United States Patent Application Publication US 2004/0034888 A1 - sequence listing, part 22

SEQ ID NO: 71616 - protein, 138 aa, Zea mays
  Clone ID: UC-ZMFLMO17318B02_FLI.pep
EVKTELPAELSMIQDENHSKYDLSDEDVSVEGTDASDDDILADNQDPADEDIEDIEPKEDEKDSEELIVIDDEPWAPDPFIPVVPNPKTRAPEIPVPEAPAPVALASEGPPQGNTMPDLVPQPDWVRTKSHNHQLRCG

SEQ ID NO: 71617 - protein, 85 aa, Zea mays
  Clone ID: 700624459_FLI.pep
PNKALQKIKKKDLDSGHVYVWSFRSESDGSALPRWLKIMKSRLAGSETILFSSECGSTERNLVGTARPAHMHKTNPKSNSIITSM

SEQ ID NO: 71618 - protein, 594 aa, Zea mays
  Clone ID: UC-ZMROB73006G11_FLI.pep
FPQLPLVSRPPQAKPPHRFALSTDESSPAELIGDWSCAEMLVLFETPAGFALFKVLDEGKLDKVEDLWKEFTTSDSARKVVELKAFNKFENTSDALSAATLIIDSKPSKGLRKFLQKHCEGETLAVADSKLGNAIKEKLKIDCLHNSAVMELMRGLRNQLTELITGLGAQDLGPMSLGLSHSLSRYKLKFSPEKVDTMIIQAIGLLDDLDKELNTYAMRVREWYGWHFPELTKIVTDNIQYAKVVKMMGNRVNAVNLDFSEILSDEELETQLKEAAVISMGTEVSDLDLSNIRELCDQVLALSEYRAQLYDYLRSRMNTIAPNLTALVGELVGARLIAHGGSLLNLAKQPGSTIQILGAEKALFRALKTKHSTPKYGLIYHASLIGKASQKHKGKISRSLAAKTALAIRYDALGDGEDNSIGTESRLKLETRLQVLEGRELGKSAGSTKGKPKIEVYEKDRKKGTGALTTPAKTYNPAADLVLTEETPKKSELASKKRKHNEVETEPLAEPAEEAIQEDGDQEDRKKKKKKNKESKEAPAGEGDGEKKKKKKSKEVEEEPVVAAASEVKKKKKKSDADGEDVAMQTEESGKKEK

SEQ ID NO: 71619 - protein, 212 aa, Zea mays
  Clone ID: UC-ZMROB73030H03_FLI.pep
IEQRSCVVYLQKLVVQIAGARPHRTQGKRATTRSEQVLEGGELELARGGERDGEVADDGEVDGEPDLELVVDVPVPADVPDEGDEEVVGHLGGDLQRGGAAGGDPAGVRHGAGRHLLAGAPERVGHLADGEAVVVGVGHVHAAVQRDALPAQALERHAVQRRLGLGDVRDLLRDEPLRLVHQALLLVMLSLAPRRVLARHGSSLLVHFDQAA

SEQ ID NO: 71620 - protein, 460 aa, Zea mays
  Clone ID: UC-ZMROB73024G01_FLI.pep
RTQKSATLLFFLSFSFPLLGLGGYSSCPTRKTAPARGRGHVLPAAPPGRPRRHGGGGVRARARGGRRRRCLRGGEIVQQPRVPDVRRPAPPRRVAALVLRRRGVVPVGGVPGGPAVRRRVGRLGPEPQGPEHGRHAGAGGRPQRRRRRRRRVRGADLQHLRHLARLPGGPPRLPDVRPRRRARRRRPRPDLRHAQAPERHGRRRGQPGVAGGALLRRDPDTRNERRQHERQGHAEPPHRRHRRRQRWGQYPQEEKYARDPERRELGPPAAHGRHLRSVPQDVQVRRPGLVLPPRGVPAGRVRRRGVRLGHRHPPREPVQGDHLLAPPEHRDHGLRPRHSAGLCAVLEAEEGAQVPGVLERVPPLGGVHGDRAGRRQRLQGHGHPGRGAEVEDGLRRRRLRAGRRRRGAGGRHVGRRAAAPEAGGKDLQRRPLAAVYVIYIYIPHRRRRRGRLTIYLSDLI

SEQ ID NO: 71621 - protein, 359 aa, Zea mays
  Clone ID: UC-ZMROB73020G12_FLI.pep
LSAAGELPPPEAPTTISPNPSATSMATTSFFHPLAAPMDRGSVCFRRCPFSLTIPARTAPRRPAPLLVVRAKRAGSQPPAAAASRQPANPSAVPKRDVEEEEEEVEEEMPWIQDKALDLVEFTGTVTQAIPGPRVGSSPVPWLLAVPLAYVGVSFVLAVVRTVRKFTSPHTKKKRRVSKNIFLLKSLDDLFQKGREAINYPALQDLMQKTGFDMDDVVRKYIRYTLNEKQFSPDVVVDLIHLRKASMLEDAEVAEILNEISRRIVREKGPVVMDLSGFTEQGFKRKLAVQALFGKILYLSELPEFCSRDSSLVVKEIFGVTDEDADSLRIHTLSATGDIESIQKMVDDLDLEQGPPSSS

SEQ ID NO: 71622 - protein, 429 aa, Zea mays
  Clone ID: UC-ZMROB73030H10_FLI.pep
QLPLRRESTTDPTRRAMAASNAGPEAAATAAGHRFNFDVIVVGAGIMGSCTAHAAASRGARVLLLERFDLLHHLGSSHGESRTIRDAYPKAQYPPMVRLARRLWAEAEAESGYSVLTPAPQLSLGPRSNASLLAAVRSAGAEEADLTRRWGGAFRVPDGWVAAVSERGGGVLNATKAVAMFQALAVRKGVVVRDKTEVLGVRKALEEGGVVVTTSTGAEFRGAKCVVTVGAWASKMVRSIAGLELPIQPLHTMVLYWRIKPGHERELAAESGFPTFSSYGDPHVYSTPSLELPGLIKINYDGGPPCDPDARDWADGGGGVAERVARWIEEFLPDHVDTAGGPVSRLSCMYSMTPDKDFVIDFLGGEFGKDVVVGAGFSGHGFKMAPAVGRILAEMAMYGKESTATEAGVELGHFRINRFEGNPLGNAAN

SEQ ID NO: 71623 - protein, 366 aa, Zea mays
  Clone ID: UC-ZMROB73033A04_FLI.pep
CDPRSLRRASIMSAYCGKYADELIKNAAYIGTPGKGILAADESTGTIGKRLSSINVENVEENRRALRELLFCCPGALQYISGVILFEETLYQKTKDGKPFVDVLKEGGVLPGIKVDKGTIEVVGTDKETTTQGHDDLGKRCAKYYEAGARFAKWRAVLKIGPNEPSQLAIDLNAQGLARYAIICQENGLVPIVEPEILVDGPHDIDRCAYVTETVLAACYKALNEHHVLLEGTLLKPNMVTPGSDSKKVTPEVIAQYTVRTLQRTVPAAVPAVVFLSGGQSEEEATLNLNAMNKLSTKKPWALSFSFGRALQASTLKAWAGKVENVEKARAAFLARCKANSEATLGTYKGDAAADTESLHVKDYKY

SEQ ID NO: 71624 - protein, 417 aa, Zea mays
  Clone ID: UC-ZMROB73036B07_FLI.pep
AITDHSISSLVYRTAPHPRARRRSPASTYICLAARAKLAEMARALPLVLAASVLLAAAALLLAAAPAPAAAVDFGAEDLASEEALWALYERWRGRHALARDLGDKARRFNVFKANVRLIHEFNRRDEPYKLRLNRFGDMTADEFRRHYAGSRVAHHRMFRGDRQGSSASASSFMYADARDVPASVDWRQKGAVTDVKDQGQCGSCWAFSTIAAVEGINAIKTKNLTSLSEQQLVDCDTKANAGCNGGLMDYAFQYIAKHGGVAAEDAYPYRARQASCKKSPAPVVTIDGYEDVPANDESALKKAVAHQPVSVAIEASGSHFQFYSEGVFSGRCGTELDHGVAAVGYGVTADGTKYWLVKNSWGPEWGEKGYIRMARDVAAKEGHCGIAMEASYPVKTSPNPKVHAVVDEDGSSHDEL

SEQ ID NO: 71625 - protein, 492 aa, Zea mays
  Clone ID: UC-ZMROB73037A05_FLI.pep
ANKGGKQLKERNELWSARCYEPAVTVDRLGHHLLLLRPLRKYVAGVAVLDKRVHPRDVWLGGSRRGGRGLPTERERRGLAELVQLVALDAPVQPAVRRPPVGEHGRRAGGGLLRHERARGRRAAAAVDEALAALGERRGAGAHDGLGHGVVEPERGVRADHGRRRHVQLRVRHGAVRRHVAGLLERQRVQLGQHGRVDGAEQVRVVRHGPGAGRRGGQRRAHPASPAGPRRRHLVEQLLLVLVEREQLEVQVQLPAGGERGLEPAGRGGGPGRVEHGAHVEAVGRRGARRRNGGLHPDGDRGRVDGAQLLGLVREEADAARAADLVLAEARPVLRRVEPALEDAVRVLAVVALAAGAALAELRAGDAAVGEAARVAAARVLAGVHEGALGPVVGVGARAGLHLEAVHAELVGAEEPALEVWEREVGRVLLPRLRRRSCRRRRWRRGGLLGRGRRRRRGGLEEHAERAVPVGGGVGAREEVAGAEARESERVG

SEQ ID NO: 71626 - protein, 216 aa, Zea mays subsp. mexicana
  Clone ID: UC-ZMROTEOSINTE002D12_FLI.pep
AGTGKTLLARAVAHHTDCTFIRVSGSELVQKYIGEGSRMVRELFVMAREHAPSIIFMDEIDSIGSARMESGTGNGDSEVQRTMLELLNQLDGFEASNKIKVLMATNRIDILDQALLRPGRIDRKIEFPNPNEDSRFDILKIHSRKMNLMRGIDLKKIAEKMNGASGAELKAVCTEAGMFALRERRVHVTQEDFEMAVAKVMKKDTEKNMSLRKLWK

SEQ ID NO: 71627 - protein, 185 aa, Zea mays
  Clone ID: LIB143-039-D7_FLI.pep
ASSILALDQIIHSSGLFVSITLRLIQHFSSTSCDQITYHIMIRLDFSCKNDDSSLVSHFVEHPAGVILDCASSPLNPGISPHISHISTHILTINHKPHISIKEISSIRQRDLTDDYELHKSTTRHPWREVLLFLAERGWASSCRGEYAEQEEPPWAISPWEEVRAQLAAINGELETSCAAHIRKG

SEQ ID NO: 71628 - protein, 124 aa, Zea mays
  Clone ID: LIB143-068-E11_FLI.pep
QDRENVQMNEPQDQETKARQATIQWRVQLTLDRILFRRCYIHIYYASSSSSSRAPPLGRLSCSCSCSWCRRTCRCCSRRRWPWWSAQRGCRWRRRSPLQGTNCSSRMGTRSQGGSCSRRRSNTP

SEQ ID NO: 71629 - protein, 151 aa, Zea mays
  Clone ID: LIB148-039-B9_FLI.pep
KSSRKRKEKKQTKGRRRCATATAVPNQSTPTHRECAGAAEQRSAAKSLPPPWSLPSGSGSSSGGSVNVVREEGGHGGPDDGGCDRGGAAGGRRSRRLRGQRHGGRGGDEDGAGDLLHLHPWMRRLISDRRDGGGGMGWRRGSLSLLRRSLA

SEQ ID NO: 71630 - protein, 209 aa, Zea mays
  Clone ID: LIB189-004-F1_FLI.pep
VTSLADQGFDGGTNVLPSPPRCVRPPSAHSYITPHRVQRSLSRPAVSYPRSPLASYPPWPSRRPPRRRRSPPRQRSPRPCTCTSRPRRPAASRCSPSRAPPSRRRCASALRAPASPRARPSRARSCHHPPPPPTPQPPTSAAAAASAAMTTTTATTTTAATAARVAATTAATATTRPAAATPAGRRCSCWRSWAASSTACRPISPPPST

SEQ ID NO: 71631 - protein, 150 aa, Zea mays
  Clone ID: LIB189-019-B4_FLI.pep
FEGIADQFQNNNNVRLLLKYDDALAHMIFAASDMFIVPSMFEPCGLTQMVAMRYGSVPVVRRTGGLNDSVFDLDDETIPMEVRNGFTFLKADEQDFGNALERAFNYYHRKPEVWKQLVQKDMKIDFSWDTSVSQYEEIYQKAATRARAAA

SEQ ID NO: 71632 - protein, 295 aa, Zea mays
  Clone ID: LIB3059-034-G12_FLI.pep
QTQTLNIHPPEKRSLVLGDVLADDLGRRYAEEVPGLPWHGPLDHEHPEVVVDLDDLELPDLGLGSSHPPGHLLPLVHAARRRPGSDGTQLPVALGTVRHQPALEVVPLDATLEPLADGVAGDVDEVALLEEVGEVEGLAGLEGVDGGEPELLQVAQRRGAGLAQVAQLRAGELVLAHAVVPDLDGVVPVRGGRLHLRHHVAALPEPDHGHRHRLPRLRIEVGHHPHLGRHHAHPGLVRRAHRHGRPPPPAAPGDGALAALREEERHCAAHAHGRHGHACFDLTGISRGEWRSRSI

SEQ ID NO: 71633 - protein, 243 aa, Zea mays
  Clone ID: LIB3059-045-E5_FLI.pep
KQSPEQSSAERRSSGISHSTNEAPPSDPTRSAMAAGLKRPSFGTRAWRLLRLAVLWARKGGAAHSLRLRLLRTLRRHGHGLAGLGGARGDRLRCGEREYSIDETPAFRFRTPSARVLRLIPCIAPAVPDTPGLYGDDRYFFSAAAAARETGEGAGCCYSDVDDEEEDDEEPSCCGDGEMLLERVVPEACRASSAGRSVAADSGEDAGVDVKADEFIARFYAQMKLQRQISWLQYNEMMERSIS

SEQ ID NO: 71634 - protein, 241 aa, Zea mays
  Clone ID: LIB3061-003-C5_FLI.pep
STVCAVHGFILLSARSQLTHALREETPGDAAVCALGKEAAVLGGVTGAVHDAEDLLRRAVVGERQVVAGDDVPHGQPLGPQLGRHHQALVLHAPPPQRVPEVRDACRDLRHPAGIARHTRHPALVQQRTDHRVLRRLHRQQPRQQLSGLRGEEPGVGADVAGEADVGDDVGGDEEVEAVLVGVEGRVQRRVQRLLDDLAEVGRADVQQRPREAPHRLLDRPEVPDFLVTELGGHVADERGE

SEQ ID NO: 71635 - protein, 407 aa, Zea mays
  Clone ID: LIB3061-035-E12_FLI.pep
TPPAKAKKGEKLAPDATPAGKAKKGKTELETLAPDATPAGKAKKGKVEKTAPEATPSGKGKKGGDKLEKPAALDRSPSDSKSEKLAHFSRTWEKDDEMKILEALAAHVKSEGVLPKTDFLLASVRDRLVRKNCNYTDIYEKVRRLKERYEKLVSTGTVPSKEDELQMYNLSKTIWGEKSKEATAAITSQKGGAVTKRKKGQANKEKMDGNAKSGVAKEAAHSTANQSGDSHKGSKKGQARLSEDATTTVSPSKSKKQETRNEELDKDGGNLAKGKKGKTDKGKMDRDTDNLTPKETINENQNGDILIRSKEGEIHDDETGDANVQGVRRGFDKLQKLYSNLAFYVEEIEAHHPCGETLKRAFEFIADEKAEGLESKIKKQRVAEAKAEVRQGDVKKEVLNLLLSLVD

SEQ ID NO: 71636 - protein, 318 aa, Zea mays
  Clone ID: LIB189-032-B11_FLI.pep
IPPKMSTESLVFKGSLVGHKDGITAIATSSENPDMILTASRDKTIIMWTLTRDDSSFGYPKRILHGHNHFVSDVVVSSDGQFALSSSWDKTLRLWDLNTGLTTRRFVGHTSDVLSVSFSADNRQIVSGSRDRTIKLWNTLGECKFNIQEDGHSEWVSCVRFSPNPMNPVIVSAGWDKVVKVWELSKCKLRTNHFGHTGYITTVTVSPDGSLCASGGKDGITMLWDLNEGKHLYSLEAGDTINALVFSPNRYWLCAATQSCIKIFDLESKSIVDELRPDFNITAKAREPECTSLAWSSDGSSLFAGYSDSVVRVFSVVA

SEQ ID NO: 71637 - protein, 106 aa, Zea mays
  Clone ID: LIB3059-036-E8_FLI.pep
ASHKPHCYKIPHNPIYSEQPMAHNRTPPVAANTTPDIYVLSGYGRPDAGGSRPYWASTIAKQGNPMCTQDRSQNRFIWFCLHDACSFVHYPLVLALFIPRLLWKGD

SEQ ID NO: 71638 - protein, 152 aa, Zea mays
  Clone ID: LIB3059-017-H3_FLI.pep
SKERKIMYTSELEKKVQTLQTEATTLSAQLTLLQRDTTGLTAENRELKLRLQSMEEQAKLRDALNEALREEVQRLKIAAGQVGNMNGNPFNGGLQQQIPSYFVQQQQQQQTPYFGGHQAQLHNQNQNHRHQISSNVGQTLSGQSLNDSMDFM

SEQ ID NO: 71639 - protein, 132 aa, Zea mays
  Clone ID: LIB189-021-E7_FLI.pep
VRARTIAKYDDPAQPVNHSNPHKHFDVTRALRTDTPSVGTNGLLPGGGLLLGGGEVGGPGRLRPPRRRRPAARRQGEVRGGRHGLTRRRQPPPPPWSPRRPRLRGARDQGRRGHQHLHRRGPRAQGELPRQG

SEQ ID NO: 71640 - protein, 117 aa, Zea mays
  Clone ID: LIB3066-017-H3_FLI.pep
APSAEQFPESPTALCLSIGDDWATAATGALRQVSRSRALLRHRAPTSGIYHGGQAHGSSACRPSWWGSGICEDRWGDESRRRCQDWCSRCSRHGCNISCHIGKRRKRRHFKAGNEMI

SEQ ID NO: 71641 - protein, 431 aa, Zea mays
  Clone ID: LIB3066-047-H12_FLI.pep
TGLPGGKNAEPLKVDIIGHDLQMCTLFQAQINGNWYSTVIETLPSATSYSPNGELQPTLQKMRILVGQPLKQPPNYISGDFMIPVMAGADSTPDFGFESFFEDKDCCKGLSGFLIYGTSDFVTVRKEVHVRTRRVRLLGLEGAGKTSLLKAMLGQVKERNSTVLECIHVDLHGKGISNGLCYIDSTTVNLQELPLEVGRFKEELLLGLHDISRKTDLVIAVHNLAHRIPQYQRSNTSQPQPALSLLLDEAKALSIPWILAITNKFSVSAHEQNRLISSAMEAYQVSPEMTKVVNSSPFLMPSARNSLQQIRSATGKLKKDPANRSGYLPVNFGLSSFQRKDIVMHVEGVSSLRQLVHQVVLNNEETAFEELARERLLKELASEKAASLQVKQKPRKRDGSVTAAAVGASLGAGLGIVMAVIMGAASALRKP

SEQ ID NO: 71642 - protein, 90 aa, Zea mays
  Clone ID: LIB3067-004-C5_FLI.pep
SLAETLAGSLGPSGSSGNVANYMGQMAMAMGKLGTLENFLRQADNLRQQTLHQMQRILTIRQAARALLAIHDYFSRLRALSSLWLARPRE

SEQ ID NO: 71643 - protein, 247 aa, Zea mays
  Clone ID: LIB3066-002-E9_FLI.pep
SPRPPRTPPTTTPLPRPWLGAPSPARVPRPPRLGAPPRTPVLPSPRVGAPSPAPPPVRPPQLGAPLPTPVAPTPQLEDPSRGPILPRPPLKGVPPSTPPLVAPRLGAPLPSPPVPSARKGTPPPPPQFRVPIRSPVIPPPQKGIPPSAPLIPAPRLGVPLPSPPVQQPPRTPILPPSRKGAPPSIPPLSPPKLGAPLPSPLLPPPRLGAPPRTPILAPPPQVRAVFPSPRSPPPRLGAPLPTPLLPP

SEQ ID NO: 71644 - protein, 208 aa, Zea mays
  Clone ID: LIB3066-023-A10_FLI.pep
QAQRWWTENYEKVMELYNVQKSNSQVDPLPSIPRSDSEISKDDTPATAPLNKGQLLRTSPRPLKGSEAIGYSSSDCPQHQSSHLRNVYRKDRYLGHQFCDPVELASTPELSSISGAKTETSIGASVRTSSSPEEVDGSGELSASVSNASDEEREWVEEDEPGVYITIRALPGSIRELRRVRFSRERFSEMHARLWWEENQARIYEQYL

SEQ ID NO: 71645 - protein, 566 aa, Zea mays
  Clone ID: LIB3066-023-A3_FLI.pep
NEENKNSCKKISSLQHQLDLSSKDQEAQQNILSQIEEVKRENILLQAKNTEMEQELLKAQKCSHDNMDKLHDVEKNYVHLRDNLKNLEDKISNLEDENHLLRQKALNLSPRHSRTGSYHCGSSPCSPKSFVESSPVKLAPPPHNQTESRRSRMNSDRYEDYHDVLHRCIKDDMGFKKGKPVAACIIYKCLLYWGVFEAERTTIFDFIIHTINTTLKAENENDILPYWLANTSALLCMLQRNLRSKGFIMAASRSSSDTHLSEKANETFRTPLRAFGQQISMSHIDARYPAMLFKQQLTASLEKIFGLIRDNLKKEISPLLSLCIQAPKLARGGSGRRSRSPDVALQQPISTHWDRIVKFLDSLMDRLHKNFVPSFFTRKLVTQVFSFINVQLFNSMLLRRECCTFSNGEYVKSGLCVLEKWIVDTEEHAGAAWDELQFIRQAVDFLIIPQKSKKTIEQIKKNICPALSVRQIYRLCTMYWDDKYGTHSVSAEVVARMRDMVSNDMQNPVSNSFLLDDDLSIPFTTEEIAEQVPDVDMSNIETPASLRHVHSAQFLTQHLQPPYTSR

SEQ ID NO: 71646 - protein, 86 aa, Zea mays
  Clone ID: LIB3066-031-D3_FLI.pep
WPARVCSSWCSSWPPSRWRRLRGLRVWMSWRAGPWRPPTRLRRRLTRPLPVPTPPHPRTRRRRRPPAAAHPTSRAQRSSCHDLSSK

SEQ ID NO: 71647 - protein, 171 aa, Zea mays
  Clone ID: LIB3066-038-C6_FLI.pep
SADQLRALAIIPLPFLQCAAPARPRAGLRVHEELEPAVLLAGLQQLLRRQAHLPQHEASTLAVRPQAEPRPPALADHGDRRRERPPAPRPPQHDHVVLVVVVAAAAAGVVGLLLLLPARRQRGRRRPCAANGRSAGDGVVRHVDVAARRRRRSRSSLRWSRSRGRGGRRVG

SEQ ID NO: 71648 - protein, 73 aa, Zea mays
  Clone ID: LIB3066-038-D7_FLI.pep
GLCRPRGDAGRRCRGGVRSSHGVPLPRDVRPRPRPRQVQAWQVQARQVWQAQEDVWQAQEYVRSQVEVINVQL

SEQ ID NO: 71649 - protein, 115 aa, Zea mays
  Clone ID: LIB3066-045-C8_FLI.pep
TRRGQTRLAREGNARKSPLSLSFSCVQHRARSVDALDGAVGRWHRQADDLAAAEAGLRHVVLVPERPLRRDDAHVQLLAEVLPLPDVGADAPHARVVERHHHRRPRPWVHLDRVP

SEQ ID NO: 71650 - protein, 100 aa, Zea mays
  Clone ID: LIB3067-018-H11_FLI.pep
SSLIQAKERHPRTNRTNINIPLSSLSAIQIAGFVPPSPAMRSTIPTPSDHEEGDERDQSGDGPRPRLAARQPRGTANGRRGGWGQASQKCVLLQLPAGCR

SEQ ID NO: 71651 - protein, 231 aa, Zea mays
  Clone ID: LIB3062-029-E2_FLI.pep
RPMPAPCRAVAVAVAPERRTPGDRLTQRARSAAVRRWTHSTDFSTAATAASGAGTAASSSVAATSGVAATAGDASPSSSLASTAAASLVSAAISGSAASTGAAAASVSAAGAAASGSASLGSASVGSASATASASTSTSLDSVSASADTGSLAATTSVSAAGAAVSSFGVSTAASWAASTPAAAAAAASSTGAAVGTWTSTAAIGAVQLDVCVELWTVELTANNEGTEARS

SEQ ID NO: 71652 - protein, 255 aa, Zea mays
  Clone ID: LIB3066-037-E12_FLI.pep
EPLKQAELKAVRNEIKPDPMSTMRAPQVPSMLPFNNLAFGATFGGPASLKPMTMAPMPMAMPMSPAPLTKKPTPAAATPLCGKSDTDNLKMAKQVLNEDISKLQSQVNKLKQKCDAQEEQLQKAERRAEHSASTAAEESSRRNGVLEFIRFLDNELKSIADRVPSDAADGLKALQNHSERFLTEQGVRPLEATGMHRKCASIGNLVMSQDGSAGNASSSAASLASESPCHRIMENSSRANGDLAPKLGVPMEKCS

SEQ ID NO: 71653 - protein, 210 aa, Zea mays
  Clone ID: LIB3067-008-F3_FLI.pep
FLEPSLPLVIPLVTMPALAKPASRTAKPAAAPKPKPAAAKPKAATAGASHPPYFEMIKEAITALKERTGSSSQAIAKYVGDKHGASLPANFKKMLSIQLRGSAAKGKLVKVKASYKLSDAAKKASPKTKAKPAKAAAAKTTAPKPAKAAAAKSKKAAAAKPKKAAAAGTKRKVPEKKVVAKPKKSPAAKAKAKPKTVKSPASKKARKASA

SEQ ID NO: 71654 - protein, 75 aa, Zea mays
  Clone ID: LIB3116-021-D5_FLI.pep
SDFMSLTGALSTFPLTFVLANHMYLMVKGPKLGAIQKSWHWLNVLGFTALAVAAAVSAIRLIMRDSSTYHFFADL

SEQ ID NO: 71655 - protein, 164 aa, Zea mays
  Clone ID: LIB3059-029-A12_FLI.pep
ELMLLMLLATPLPLLERDLPLVQLLLCLWRFFGAFVSRAGVKVVDVLSPKVFIGLIVGAMLPYWFSAMTVKSVGSAALKMVEEVRRQFNTIPGLMEGTTKPDYATYWKISTDASIKEMIPPGALVMLTPLIVGTLFGVETLYGVLAGALVSGVQPSFSLNRKEL

SEQ ID NO: 71656 - protein, 340 aa, Zea mays
  Clone ID: LIB3137-002-C4_FLI.pep
FSLITVERFLRHRSHVTRLQPESSSSRASRSLARFSVSESGGRSAANSTGKRSAARRDAITRPSLVRHGVAGVVEAQPLRVGERRRLAVRRRRQGLPLRGGERVRGHDEAADAGAHPVEDVAPAPGAPAVAALVLVHLEVARGPRLPGQEPADDAPPPPLPQGAASRGEGGRRPGAPERPLGRRGGDGLDLAREGGQPLPQAREVALLSAAAAAAAEGWQLVLERPGRQEPRLLDGLQDCGHGWAGRVEASRQGKQRGRAEKLALEPAFKGQWSSPPALSPPTPTQMARSLFASPFNLVWSSGQRMVERWYVYPVFVSQPQQLASAWTDYWLYSRRHEPG

SEQ ID NO: 71657 - protein, 73 aa, Zea mays
  Clone ID: LIB3150-066-F8_FLI.pep
FSCRTWISYPQILKKHTFFKLGVWCCSSVDKLDYLAEIKISGFLVTAKGTLRCLFQLGAIDRRIVMQCLSSLH

SEQ ID NO: 71658 - protein, 218 aa, Zea mays
  Clone ID: LIB3136-018-B2_FLI.pep
RRGRVLPVLKGCSLLVPPGQLWMLLGPNGCGKSTLLKVLAGFQNPTAGTVYINRPCSYVFQNPDHQVVMPTVGSDVAFGLGKLKLPLDEVRLRVSKSLDAVGMLRYSQRPIQTLSGGQKQRVAIAGALAEASKVLLLDELTTFLDEHDQIGVINAVRDSVAADGEVAALWVTHRLEELKYADGAIYMEDGQIIIQGDVSTISKFIKKKQARYFGHFEL

SEQ ID NO: 71659 - protein, 163 aa, Zea mays
  Clone ID: LIB3137-050-G12_FLI.pep
HSNQRAAVLSSCVSLQMAFVFSFAPPISFPRVTGASAAYPSFTSSPVVVVGCTVSETRFPPVSDATAWPGAGTRCATVPPASSLRRCTAPEIASLSARSSSPGRSFSAMYPVTVTPLSCSPAPGVAVAAAPVSRCAPTPGVAVPADCVACWTLPATAVPTPAT

SEQ ID NO: 71660 - protein, 137 aa, Zea mays
  Clone ID: LIB3150-005-H6_FLI.pep
AVRPSTRSSPSPSAAPERRPSPEPRRQPWRLSPPRSPPWPACGCCHGPRPTSTPPARRSSSPRWLGWPTSSPPTRRSCRWRGATRSSKPLTTSRTPPSRAPAVPTRLSSGRETWPSSRASYLPLSVRSSSVQSTTNA

SEQ ID NO: 71661 - protein, 154 aa, Zea mays
  Clone ID: LIB3152-019-A3_FLI.pep
AIGGLQSLKGMAVDESLINYDVLLHVHQCCPDFVELKVSALYVDEDMASVICNSLPRLKKLEIPSCDMSSAAIIRFLDCLEQLEHLDISGYETSAISSPVLEKASRLKVFLWNSKFELGEFMDCSNCGEHNINPQEPCKCMMEHKVMDWLAGPS

SEQ ID NO: 71662 - protein, 103 aa, Zea mays
  Clone ID: LIB3150-108-E4_FLI.pep
WKSSFPYNLISFASKETTVKYLSAFASELLGPRLRLDQLPESAISQSTNVCLPLHLPFLGSVIKLTRDTNQLVDTRYKCFHKPTMHFMTQHDISRLWFSTSDT

SEQ ID NO: 71663 - protein, 357 aa, Zea mays
  Clone ID: LIB148-034-C5_FLI.pep
ARMLAEASMATKCPEGKVPLISINALHQLHIFIFFLAVFHVSYSAITMALGRAKIRAWKEWEKEAAGQDYEFSHDPTRFRFTHETSFVRQHMNVLNKFPASFYISNFFRQFFRSVRQADYCALRHSFVNVHLAPGSKFDFQKYIKRSLEDDFKVIVGISPPLWASALIFLFLNVNGWHTMLWISIMPVVIILSVGTKLQGIICRMAIDITERHAVIQGIPMVQVSDSYFWFARPTFVLFLIHFTLFQNGFQIIYFLWILYEYGMDSCFNDSEEFVFARLCLGVVVQVLCSYVTLPLYALVSQMGSTMKQSIFDEQTSKALKNWRAGAKKKAPTGGSKHGGGGSPTAGGSPTKADGDA

SEQ ID NO: 71664 - protein, 153 aa, Zea mays
  Clone ID: LIB148-036-A5_FLI.pep
QAPPPPPPANNSAAATATSAMGACATKPKTLEGQAPAEAAVSTPKVAPEATPISVEVAADEQVAEKVVVEEPAAAADVEHQKANEVVAPEAAVAEPDHKEEEAVEKTVVEEEKPAAAANAEEKVATAAETTTTVEAKKKDVEEARKEKQAQQS

SEQ ID NO: 71665 - protein, 261 aa, Zea mays
  Clone ID: LIB148-019-D12_FLI.pep
TNKYNMDRDMYGAPRINQRINNQLMNLGAGGGRRRRRVTGATGGPLDERVGDAHERLEVLVLGEQRGFDGRGWGVLAADVAGPRVLLRRVQEQLHVVELAVVEAALGVVQVVQRLLDLPGALVQALPHVVVLHHVHLVPRVVARRAARGRRRAERRLRQVPRGLGVAVRLERAQAHVRVRRRCTRHLDVDAGAGAGGAHAEGHGQEQRDGHGQKGAAVPAHGRSRLHRRGYARTMDRIGDACYSGRPGRWERREEIAIASY

SEQ ID NO: 71666 - protein, 190 aa, Zea mays
  Clone ID: LIB3062-041-G7_FLI.pep
GLRGPGPAGGAPRGAAPRGAALLRAPGRRAPPRPAARGGRRARRPGLGRALLPGLRIRIRLRRAGTAETRRRRAPRLRAAARGRGARAAQDDGLGGATGAAARAPRQAPRALRVGPHRDPRVSRRVGLRRTGTNSLPLNWLWNWKQRTRTRTPGRTEEIPGTGRGRRILISTSSRGGPDLCTCKSWMKRE

SEQ ID NO: 71667 - protein, 220 aa, Zea mays
  Clone ID: UC-ZMFLB73274A01_FLI.pep
FVRSSPYRRARRSGPALVTAAAIEDAVDCGSSSVSGTGVWKRAPAGEKVPSLLNLAPLRGQVLGCGDEAVAATRQQTWWFRPSIRLDGACSGASEGPVKLGLSDLGATILNLDDDASDLGGSDVYWYSLFPFSGACWFVEETRPRWRQLTATTEVAAVVEDWRFILKGLVVLSLSRVGRFRPSGSRVRFLAGLVLVRPDLGFAGGCQSSAACFSWRHRRG

SEQ ID NO: 71668 - protein, 207 aa, Zea mays
  Clone ID: LIB3062-002-A1_FLI.pep
LHLATADPPQPTRSKKKNPKRSDAMGTDGGIITHTGRRQQYLLCLAGGSGTYFAWLRHCGVHRQSVQPQQRKKQHIMETSATDSTAVTTPHSAASTRTGTSRTSSGHRRAAAPSCSGRDRCHCHHSWTWTRRCAGGAGSSAARLGRPRSGGHRSMDTRRPPMGPPGRAPASKRAGWSPSLSPLDPGAGRAASASVGRSPPRRLALFK

SEQ ID NO: 71669 - protein, 107 aa, Zea mays
  Clone ID: LIB3136-045-G11_FLI.pep
RLWHVIPNCSDNRPVYPRGQGRKLLSAAGRGLSARQLYTPRLPPEAGSVCVSCTSLGYRPNGISFAFFVLYVYLLFSPCIQSAAAIPARVWHGMAAGSRKLVFTYLV

SEQ ID NO: 71670 - protein, 477 aa, Zea mays
  Clone ID: UC-ZMFLB73275E02_FLI.pep
VLLILACDGAGDYGDADAAGVLGGDAGAASGGARAAASVLPAGLRVLQGDGRPEAADGPVRRDHPAEQAAGAGGVQVPAEGDRELGHRRGDVRPAQHDRGRGGPAGPPPRGHGGDGRDLPRRPRRALRPVGGARRRRHPPRRRRRARRQRVHVLAGAVPVGARRAALRPPRGRQGVQPHGHGLQRHAHRARPRQRLLQDARRAGGSGDDVGVDRAQLVRGQQAHLHAGQLPVPLRRLRLLPDQRPAAPAARQAPSPPRGAHPHGRLRRGLQLRAPDGGRGRPPGVPPGQGAAARRGARLRAQPPRAGAPRAAAPGAAPPRLRHPLGAPGAQEAAARRGPWPRPPHHPHEGRRRPLLRAHGRRRRHRRRRQGTHAHGARPGALPHDAAPLRQHLRQQRLVRARLHGGQGPPAPGRPRPHAHLRRRIQVQQLRLDRREARHRRRRLEGPHPPLPAQGRLQPIHGQVRIRQGPHRLVIAP

SEQ ID NO: 71671 - protein, 336 aa, Zea mays
  Clone ID: UC-ZMFLMO17399B04_FLI.pep
FVIRSHQCWSSANQSAWCSNLESVCLGGFSRVTDTGFRAIIHSCSGLHKLRVSHGSHLTDLVFHDIIATSLCLTHVSLRWCKLLTNVGIERLSCNKDLNVLDLRDCRSLGDEAVRALSCLPKLQTLTLDATDISDQSLKYLGLGTCPLTSLSLRGCRKLTNDCITLLFAGHVKQSLQMLDLSRIPSITDDGIMLLARSRTPLIELRMRENPKIGDASVMALASMQIDGGTYGSTLQLLDLFDCGGITPLAARWFKKPYFPRLRWLGITGSLNRVMVDALSRSRPFLHMACRGEELGTMLWDTSSDWYRHNDDDLDELEQWLLEGEPVSDDDTIMEE

SEQ ID NO: 71672 - protein, 310 aa, Zea mays
  Clone ID: UC-ZMFLMO17327A12_FLI.pep
GDSPSRRTRSNAAPVTAPAFLWAPKNYGFSSDDAKEVVHYQTISPKSLAKSVLEEGGWSNFMCSREDTQNNVDVAIVFIGSKLQSSDISKDKQVDPALADTLKLSFTRSEFSMAFPYVSTTVDERLEDSLLSSFAENCNNGFGRNRVTYTDTCTGQDLKKYHNMDAINDLVVSGVASRRVNHPSGQTDVIVFCSGGFENPGTAKSEGELLSQLVDLLDLSGAKYTVLYASQPSGLLESPSGLPLGRHLAEKKTNGTKAVQGEKCDGECLVKSSLLEGTFVGIVLLIILISGLMCMMGIDTPSRFEAPQES

SEQ ID NO: 71673 - protein, 186 aa, Zea mays
  Clone ID: UC-ZMFLMO17352F06_FLI.pep
GHLAYSHTNQALLRPRSFAAKDEVFCLFEGVLDNLGRLSQQHGLSSKGANEVLLVIEAYKTLRDRAPYPASFMLAQLTGSYAFVLFDKSTNSLLVASDPEGRVPLFWGITADGCVAFSDDIDILKGSCGKSLAPFPQGCFYSNALGGLKCYENPKHKVTAVPADEEEICGATFKVVEGSTVLTALH

SEQ ID NO: 71674 - protein, 111 aa, Zea mays
  Clone ID: 700379139_FLI.pep
LVEVLAVDTVEVQEQEVALEAAMVEALVEATVVVLALVVAVALALAAVEVMVVVPEAEAEVEVEVASAAVCDSTSYIHAWRVHASARRTPLAVSGMRGVKLIACVRYTDRS

SEQ ID NO: 71675 - protein, 269 aa, Zea mays
  Clone ID: 700077152_FLI.pep
LGDMDLQEKTTPTHKGKGKKKESAKKKERARKRTSSVLDSTNDTVISEEMPEYNLDEPTMEEKLATLNLINRENEIHGSEKQSLSVAPPSADSVHILLKQALRADDSVALLTCLYNRDEKVITKSISLLTPADVVKLLKFFVLQIQSRGAVLVCLLPWLQTLLNRHMSSIVSQESSLSLLNSLYQLIDARTSTFKSALQLSTTLDYLFSEIADDEADEEVPPPIIYEDKDTDDDESEVDAMETDREEAEELGAVTDASENSDGSEIMSD

SEQ ID NO: 71676 - protein, 118 aa, Zea mays
  Clone ID: 700072404_FLI.pep
NPQFRKADIAVQNETTAGAWTNAGTVARHDLSKCCCRTPRAHVGTARGRSSAPLPKRYHQLASQLLQLSLRLPLHPCAASRRGIVLQILAAPLPWLRARRWRAAAGEYPLLPPLPSRE

SEQ ID NO: 71677 - protein, 395 aa, Zea mays
  Clone ID: UC-ZMFLMO17071E09_FLI.pep
QQNRSTISYIVVSSTKDLNNRLQSNNRLMLSNPVCSVTTPVATVLVLSAMAGAALLHLALKSKYDDEIHRKVEMFLETYRTLKPRRYTFSEVRKMTRRFSSRLGQGGFGSVYKGELPNGGVPVPVAVKMLEDSTGEEEFISEVATIGTIHHANVVRLLGFCSERSRRALVYEFMPNASLEKYIRCSSQEQSSLITASKMLEIATGIARGIEYLHQGCDQRILHFDIKPSNILLDYNLNPKISDFGLAKLCARDQSVVALTAARGTMGYIAPELYSRNFGTVSCKSDVYSFGMVVLEMVVVSAKRRKYSPAETEDQNDDVCVPEWIYEEIVTGQEPREMARGERDMVRKLAIVALWCIQWNPPNRPSMTTVVNMLTDSLQSLKIPPKPFVSSFVGQ

SEQ ID NO: 71678 - protein, 133 aa, Zea mays
  Clone ID: LIB3062-015-F11_FLI.pep
KKRTMARAARERRYGAPRRRLGAEVHVHPDGDEEDGGEGEEEDGVDEDGDGAGLEVAELDDPALARHLEQQARRQQDEEHQRDEHRRPVLHLRALLIISLCPSLLASFLNLRPSRRCRCLHSSYYICNISSSR

SEQ ID NO: 71679 - protein, 231 aa, Zea mays; identical to SEQ ID NO: 54598
  Clone ID: 700152006_FLI.pep

SEQ ID NO: 71680 - protein, 54 aa, Zea mays
  Clone ID: 700164129_FLI.pep
KARLLRDYRFLVKDKIFFGEQFMQHAILHYNYYKSDKHLQSHVKVGPRVREKSY

SEQ ID NO: 71681 - protein, 208 aa, Zea mays
  Clone ID: 700156742_FLI.pep
PHPPQPNPLQQPSSPPLQRGGDPHRRQDADLREDPDGENHHVGGGVLGHHRQREGQDTGQGGHPAGPAAAHLRRQAARGRPHPRRLQHPEGVHPPPGAPPPRWRQEAQEEDVHQAQEDQAQAQEGEARSAAVLQGGRRHRQGDPPPQGVPQHRVRCGCLHGQPLRPPLLRQVRPHLRLQSEGVIPCAALLHPPTYQAFTCWLLDLNII

SEQ ID NO: 71682 - protein, 103 aa, Zea mays
  Clone ID: 700160356_FLI.pep
SLAAAGLSLNPDRPQVDEGNKAPPGIPLVNWLQGSRSHPASSPQLPQLPASSSCLHLHLHRRPLLLQFRQRTTTGPGRGRPPQESTAPPFRSWRICSPSPYVM

SEQ ID NO: 71683 - protein, 60 aa, Zea mays
  Clone ID: 700159644_FLI.pep
KQTCLTNRTVPSSAMCILRLQVPETHPREQISRHTSHPMLLSLGLVRTHHQSTLSYNYMK

SEQ ID NO: 71684 - protein, 103 aa, Zea mays
  Clone ID: 700165080_FLI.pep
LVSLLVMHGTRNRFGNSITLINLQHNTDYQMSLLVNLTINCVNRDASASKPDQQWCRARTRQSKKQRPLHASSVQPGNHPMHNGATSLSPVHILDHPNLCSPP

SEQ ID NO: 71685 - protein, 300 aa, Zea mays
  Clone ID: LIB84-003-E6_FLI.pep
KPKHELIIPVQPSPGAASSSASASVLNGAVDWWRDVNESPLWQDRIFHALAVLYGIVSAVALVQLIRIECRVPEYGWTTQKVFHFLNFLVNGVRSAVFVLRRNVQLVEPEIIQHVLLDMPGLAFFTTYALLVLFWAEIYYQARAMSTDGLRPTFYWINSVVYAIQIILWLVLWWKPVRIMVILSKMFFAGVSLFAALGFVLYGGRLFMMLQRFPVESKGRRKKLQEVGYVTTICFSCFLIRCVMMCLNAFDKAADLDVLNHPILNFFYYLLVEIVPSALVLFILRKLPPKRGITQYHPIH

SEQ ID NO: 71686 - protein, 387 aa, Zea mays
  Clone ID: LIB3606-013-G9_FLI.pep
SPLSRALLLLAALGLFSISFLSLRSLRPAADPADKSRPLLRLHSSSTVYHSPEAFAVGYAEMERSFKVYIYPDGDPKTFYQTPRKLTGKYASEGYFFQNIRESRFRTDDPDQAHLFFVPISPHKMRGKGTSYENMTVIVKDYVEGLINKYPYWNRTLGADHFFVTCHDVGVRAFEGLQFMVKNSIRVVCSPSYNVDFIPHKDIALPQVLQPFALHEGGNDIDNRIILGFWAGHRNSKIRVILARVWENDTELAISNNRISRAIGELVYQKQFYRTKFCICPGGSQVNSARISDSIHYGCVPVILSDYYDLPFNDALDWRKFAVILRERDVYQLKNILKSISQEEFISLHKSLVQVQKHFVWHSPPVSYDAFHMVMYELWLRHNVIKY

SEQ ID NO: 71687 - protein, 165 aa, Zea mays
  Clone ID: LIB3959-008-A6_FLI.pep
RQDLLRALSAPLDRQTLLPLVSRFPAGQTLSPRRALGLSHSWTTSSVYCCRHASLALAHGFPAMELPACTRPDLPGPCRSLPVARVVPGFSSSSPAGCSTPSVPACRRVPAAQSAVVPCSTLAVPIAVLVKLCCRAALRDAGHVPVLLPRRSFPFAYLSSMGVPP

SEQ ID NO: 71688 - protein, 390 aa, Zea mays
  Clone ID: CC-ZMPO14820018F09_FLI.pep
GGAAMAAGDLEVLTALDTAKTQWYHFTAIVVAGMGFFTDAYDLFCISLVAIVVSASFKARFPAPAYAVDPAGSTPPQADFVWRIILMLGAMPAALTYYWRTKMPETARYTALVAKNAKQAAADMSKVLQVEISAGAAEEDAAAATATEPAPASFGLFSGEFLRRHGLHLLGTSSTWFLLDIAFYSQNLFQKDIFSAVGWIPKAATMNALEELFSIARAQSLIALCGTVPGYWFTVALIDVLGRFAIQVTGFLMMTVFMLGLAVPYEHWTTPGHHIGFIVMYGLTFFFANFGPNATTFIVPAEIFPARLRSTCHGISAASGKLGAIIGSFGFLYLAQNRDPAKTDHGYPAGIGVRNSLFLLAGCNLLGLAFTFLVPESKGKSLEEMSGEND

SEQ ID NO: 71689 - protein, 521 aa, Oryza sativa
  Clone ID: UC-OSROCYP029F03_FLI.pep
VLVKLDQAKTQWYHFMAIVIAGMGFFTDAYDLFCIALVTKLLGRLYYTDITKPNPGTLPPNVSSAVTGVALCGTLAGQLFFGWLGDKLGRKSVYGFTLILMVVCSIASGLSFGHTPKSVIATLCFFRFWLGFGIGGDYPLSATIMSEYASKKTRGAFIAAVFAMQGFGILFGAIVALVVSAGFRHAYPAPSYAQNPAASLAPQADYTWRLILMFGTIPAGLTYYWRMKMPETARYTALVARNAKQAAADMSKVLHAEIEERPEVVESQVVAGETWGLFSRQFMKRHGMHLLATTSTWFLLDIAFYSQNLFQKDIFSKVGWIPPAKTMNALEELYRISRAQALIALCGTIPGYWFTVAFIDIVGRFWIQIMGFFMMTVFMLALGVPYDHWTHPAHHTGFVVLYALTFFFANFGPNSTTFIVPAEIFPARLRSTCHGISAASGKAGAIIGAFGFLYAAQDQHNPDAGYSRGIGIRNALFVLAGTNFLGMLMTLLVPESKGLSLEEMSKDNVVDETAQEAIAQA

SEQ ID NO: 71690 - protein, 190 aa, Oryza sativa nipponbare; identical to SEQ ID NO: 68492
  Clone ID: JC-OSLELIB3474027G03_FLI.pep

SEQ ID NO: 71691 - protein, 268 aa, Zea mays
  Clone ID: 700264177_FLI.pep
IVITSSYLHSTAMRISTDKRQRSRGSRAEAEPRSRNCARRTPKQTASIQERELFFSCLFFPLCQDVTLTEQPSVDERIWSFSAAAGWGGGSPWRRRPPSAAPSPRTSGSPAAHRAPSTTCRCPTPPPQALGPPSCPRRPPARSRSAGPEARRSRRGGSCRRRRPGRPRRRVGRARRTRAASGRGRPGRRTPGATTRGRSPPPPAPASPPRSAGRGTAPRKARRAPPRGSASRRCRSQPPSASSCPPSCFARSHALSCCCCTHCRAVVW

SEQ ID NO: 71692 - protein, 229 aa, Zea mays
  Clone ID: UC-ZMROMO17107A11_FLI.pep
GNVIIFSSDAKGEVMGHWYGYVVPDDVPVLLHKHIGQGEVVDRLWRGQMGLSEEQQKQALELRSMTNGGKESLEETETDGASCNPAATGGCCQGNGGFTRASEQQKQALELRSMTNGGKESLEETETDGGACNPAATGGCCQGNGGFTCCHPDLPKEKRDKSIAIEQNPKSCEENGKEGGAGSKKGNSKTCPMPTWFETWERADTYAALAVVAAAAAVFISFRIYKNLN

SEQ ID NO: 71693 - protein, 215 aa, Zea mays
  Clone ID: LIB143-014-A4_FLI.pep
ISTHAFAMENPETWNRGRRTYNSTPLLTGTLLDRRSNASTHDEDTIWHHKPRTPLLFMHGAMDWSRRDRRRRQPAAGRASESVAVRGAEAAAAEAAAPAAGEPLGPADVGAVGPAEAGAPEPVALRLARPRLRHRHRPDLCSTQQHLRHLIISTESTAQKTCKTVSRPHQRTCGQQQQHDEEDGREELARELHFFLGSQRRRATLCDRVGIQAET

SEQ ID NO: 71694 - protein, 184 aa, Zea mays
  Clone ID: UC-ZMROB73013H09_FLI.pep
GSTNPENLLRGTVQGGNSNHYQSQFGRHSSDMEFDDPAILAMGKGLMPGIGDSGLEMKNTPAFQAQLQPASSDPRFQLHVQPNVQSRQNMRFTDPMQDGLNHMNDNYLASRFLAQNQGPLSPYVQIPQQPRNSQVINGHWDGWSDLRQGNNAPMSDMSRILYPSEVNKLHMLGSNDVHNRAFGM

SEQ ID NO: 71695 - protein, 224 aa, Zea mays
  Clone ID: UC-ZMROB73015D05_FLI.pep
ADHRQPVPAFQSTISLPLLSHPPSEKQAPARTAPPRARIHRERERDRTVVRGSFGQAHDTSMAQRDKKEEPTELRAPEIALCANNCGFPGNPATQNLCQSCFSASRSSSSSSQPSPTSSPSASAPAAAVPQPRPALLDAALQLAPPAAAAGQPVEASARTSANRCSSCRKRVGLTGFRCRCGDLFCGAHRYSDRHGCRYDYRGAARDAIARENPVVRAAKIVRF

SEQ ID NO: 71696 - protein, 543 aa, Zea mays subsp. mexicana
  Clone ID: UC-ZMROTEOSINTE004A10_FLI.pep
ANNPELNWISRVLKLSLNDLPSYLRSCFLYCSIFPEDYKIRRKMISKLWIAEGLVEERGDGTTMEEVAECYLMELTQRSLFEVTERKTCGRARTFLMHDLVREVTSIIAKKEKFSIALAHGGASTTQVAHEARRLCIQRGAQTINSLRSSRLRSFILFDAEVPCSWIHDTVSCFRLLRVLCLRFVNVEQVPSVVTELYNLRYLDMSYTKVKTVPASFGKLVNLQSLDLRETYVEELPLEITRLTKLRQLQVYALYDILQRSSKFLSATKIPGNICHLKDLQTLHVVSANKVLVSQLGNLKLMRSLAIAEVQQSYIAELCNSLTKMTNLKTLFISTCNVNETLDIEMLKPLPNLTSFLLSGKLERGLPPSIFSMNLKQLKLFGSSLKKDPVSSFSHMLNLVNLFLTGAYDGEQLTFCTRWFPNLKYLQLADMEHLNWIELEDGTMMNLQYLSLAGLRNLKAVPEGIKYIRALHEMLLTDMPNEFMLKLHGSDNHIVQHIPNIKKYDSSDSQAVNNLAYLPWLANKFGPGAAIKYASINCGSSGS

SEQ ID NO: 71697 - protein, 206 aa, Zea mays
  Clone ID: UC-ZMROB73011G12_FLI.pep
FCLPFLLQPSEATRARAHACGHRRGGATAGRHVNIYDLRNMSQPEQKRDSSLKYQTRCVRCFPNGTGYALSSVEGRVSMEFFDLSESAQSKKYAFKCHRKSEAGRDTVYPVNAIAFHPIYGTFATGGCDGFVNVWDGINKKRLYQYSKYASSIAALSFSKDGHLLAVASSYTYEEGEKTHEPDAIFIRTVNEVEVKPKPKALAAPQ

SEQ ID NO: 71698 - protein, 417 aa, Zea mays
  Clone ID: UC-ZMROB73012B04_FLI.pep
RRRRRLAMGRAPCCDKASVKKGPWSPEEDAKLKAYIEEHGTGGNWIALPQKIVGLKRCGKSCRLRWLNYLRRNIKHGDFTEEEEHIICSLYISIGSRWSIIAAQLPGRTDNDIKNYWNTKLKKKLLGKRAPSRRARANQDPYLAAGGGNMCSTSGGNSAATATQTLSASALERIQLHMRLQGMYGAFGCSGGGGNDDRNAVVGAAAPQWPKLEALLQANRLLPGSLPTDAMATTVSVQQRHHQHLVDHQSLAVGAGNAAAVEGEQQQLSSADAANYMALPGGGFFERPKLGFYSPSAEAEATAAAASVEMNSVAPMVGGGYGGAGFEQYHHHDVLYEFLYSNYGSVGELAQDGHVPTLPELQCPNGAAVDGADEKFSVWTASAACDYGAAGGYQIQLGNSIGSNLHDYVLGGYDQWE

SEQ ID NO: 71699 - protein, 157 aa, Zea mays subsp. mexicana
  Clone ID: UC-ZMROTEOSINTE005F08_FLI.pep
APVPDSTNLLAATTEFACCLASTSRLQLHLLLDRIGRARHVDHHPHQRRLPAGRRRCGWPRGQEAGARDGDEDGADGGGAVLGRAARRGGRAQAREGGARDPRQGQLRRQAGLGLAKLPSSIDHLARIDAAAAKLSGFDAAAVRNLIVISTPQPDPS

SEQ ID NO: 71700 - protein, 283 aa, Zea mays
  Clone ID: UC-ZMROB73019D12_FLI.pep
RSRARREERLTTAAAATCECDNLRGGVGAGGGDICLPGWGCGGRRERQSAMAASARPGERATSFAVACSLLSRFVRQNGVAAADLGLRIKGEVEQQRTPATTNSLPGAEGEEVERRKETMELFPQSVGFSIKDAAAPREEQGDKEKPKQLTIFYGGKVLVFDDFPADKAKDLMQLASKGSPVVQNVALPQPSAAAAVTTDKAVLDPVISLAAAKKPARTNASDMPIMRKASLHRFLEKRKDRLNAKTPYQTAPSDAAPVKKEPESQPWLGLGPNAVDSSLNLS

SEQ ID NO: 71701 - protein, 284 aa, Zea mays
  Clone ID: UC-ZMROB73022C10_FLI.pep
ECSYGWIECVGIADRSAYDLKAHTDKSGVPLVAHEKFSKPREVEKLVIVPSKKDLGLAFKGNQKMVLEALEAISEKEAFEMKAELETKGETNFKVCTLGKDVVITKKMVSISMEKKLEHQRVFTPSVVEPSFGIGRIIYCLFEHSFYTRPSKSEEEQLNVFRFPPLVAPIKCTVFPLVKNQEFDDAAKVIAKALTTAGISHIIDTTAISIGRRYARTDEIGVPFAVTVDSATNVTIRERDSKEQVRVDIDEVAPVVKQLTEGQSTWTDVSAKYPAHVGPQSEQE

SEQ ID NO: 71702 - protein, 340 aa, Zea mays
  Clone ID: UC-ZMROB73080C07_FLI.pep
LHCVIGVVVWQCWTAGHQVMASSSFTSLSVMVLLCLAAAAVASAQLSPTFYSRSCPRALATIKAAVTAAVAQEARMGASLLRLHFHDCFVQGCDGSVLLNDTATFTGEQTANPNVGSIRGFGVVDNIKAQVEAVCPGVVSCADILAVAARDSVVALGGPSWRVLLGRRDSTTASLTLANSDLPAPSLDLANLTAAFAKKRLSRTDLVALSGAHTIGLAQCKNFRAHIYNDTNVNAAFATLRRANCPAAAGNGDGNLAPLDTATPTAFDNAYYTNLLAQRGLLHSDQQLFNGGATDGLVRTYASTPRRFSGDFAAAMIRMGNISPLTGTQGQIRRACSRVN

SEQ ID NO: 71703 - protein, 499 aa, Zea mays subsp. mexicana
  Clone ID: UC-ZMROTEOSINTE038A07_FLI.pep
LSMAKCLLFAKFLKSIAQEDTISSSSEQDVAVKISCELAQKHWQSALEGLGDTILVNQETQFWQVASAMLDYIMGIPNVLAWGNVLNTTCSAVKHFCSHAPRLSWRLQTDKWLSLLVSGGIEGFKNSEICLIDLFCTMLNHSEPEQRFVAVQQLGRIINSTSSTEADLKYPNYDQNFLISVSTVTSLLVTHTWDRVAALALHDSSMLLRNHAMALLTEYVPFVDRKHLQSFLSSSNGILTGLGQLSGVIEEGYFTRMSLLLFSKACLYSNPEDIALIPECVWQKLENMQTSTGGFGYMEKDLCLALCQLKSESDATTVAKVLSGCNSQPVSPDFKSIRESILQVMSSLSSIEAYFEFFAARSAQEHEELEEAEIELELIEKEKSVHNFVEHTNDTMVLAMPSYDHDGSEVNKRLQQIRENIRSLERSRLKEEITARRQKKLLLRHAREKYLEETCSRETELMQELDRERALEMEREVERQRQLDIERAKSRELQFNIDL

SEQ ID NO: 71704 - protein, 255 aa, Zea mays subsp. mexicana
  Clone ID: UC-ZMROTEOSINTE008E09_FLI.pep
GKLAPTVQCLATLQARPGEVAQAIAKFPQILFHSVEEKLCPLLAFFQTLGVSERQLAKLLMVNPRLISYSIEAKFSQTVGFLAGLGVDREGMIGKILTKEPYIMGYSVDKRLRPTAEFLKSEVGLQGPDLQRVVMTFPDILSRDVDKILRPNLAFLQSRGFSRDQVTALVAGYPPVLIKSIKHCLEPRIKFLVEEMGRDMGEVVDYPQFFRHGLKRSLEYRHKVLKQMNSSCSLSEMLDCNHKKFAMKFGLVAAV

SEQ ID NO: 71705 - protein, 195 aa, Zea mays subsp. mexicana
  Clone ID: UC-ZMROTEOSINTE013B03_FLI.pep
VRGGRRQDRQAEAAAAWTGRRAAREDPPPQPDAGRVPLRHPAAAARPPPAAAGPRRRRRRRHAFSAGAAATERLQLVPAVPPPGRRAVLRRHVQQDRNEPAVAVRARRQGLVGTQAGSAAAAAALLHDDDEQQQQQQERRRCLQRRRGARLGAQVVAGTGCSFWFCSGLGHVIASGSLGSSIAIMHAWAKNMHHI

SEQ ID NO: 71706 - protein, 85 aa, Zea mays subsp. mexicana
  Clone ID: UC-ZMROTEOSINTE117C04_FLI.pep
RCVLYFVLTVFGSGDWHWSSLQVSILCVKLFNKRFDGSFLRSRLDVDCGSKIRTGFLVFFCMIYAPTDRSCSSDSVPPGWLVAIS

SEQ ID NO: 71707 - protein, 213 aa, Zea mays
  Clone ID: UC-ZMFLMO17057G08_FLI.pep
FSTSTERERIEDIAFRNKLEFFAAAKISSSFPTPTLPEIAFAGVSNVGKSSLLNSLTRQWGVVRTSDKPGLTQTINFFQLASKLCLVDLPGYGFAYAKDEVKESWEELVKEYVSTRVGLERVCLLVHTKRGMKPLDYELVDLMERHKTPYQIVLTKTDLVFPIDVARRAMEIQESLKRNKSVVNPVMMVSSKTGAGIRNLRGVLGKLARFIKP

SEQ ID NO: 71708 - protein, 107 aa, Zea mays
  Clone ID: UC-ZMFLMO17051B01_FLI.pep
QHSHGLHNLFLRRYSTYSGTWLRLVNLLNSSAETCMCLMASKRPFQTLFNLCASEGASTASARAGGATIREEREARPAGAACISDDGANRSATQWKTTASDPFSGTG

SEQ ID NO: 71709 - protein, 114 aa, Zea mays
  Clone ID: UC-ZMFLMO17051C11_FLI.pep
EVWYRSRAEGLPQHPFLHRRDIGQLICDDEASSTDFPTPHSPSMRLQYPFLHRRINIQFIYDDKASSTNHALLQVVSVHLSRCRAHVRSRERKRRKGCGDRGCEMADSLATTRK

SEQ ID NO: 71710 - protein, 269 aa, Zea mays
  Clone ID: UC-ZMFLB73226C11_FLI.pep
RSSPALITSVGGGGGELGRRRLLLAGELVPDHPEDPQEPVGAHQLQPRRHRLDEDGVVGRHGDVGEVRPDAHPGGGEGGGEEHVDEEVQLRVPHAQLLEHLPQVQQRAGHLRHEHAGHHLRPAPLVGEPRADADDADQVVHGVVQPRVAVEVAARRVVHHVRQRNRQRLHLARGGCGGERADGARPVVDGEAGEAHGGDGVHGGDGAVAEVVGALGEQRPHQQEGGRPQHHPGRHPAHHVAAVDDVRLLHGRRRRRSRHSQRLPLPPLS

SEQ ID NO: 71711 - protein, 241 aa, Zea mays
  Clone ID: UC-ZMROB73006A12_FLI.pep
CPPKQEHGGGTEDGVDCPCKLFFAGRVGNPTRQVQRCRPEREPRAQLAPPAMAAAARAIICELAPQKVSSTAPKKRDAGTKVVLQPRLCTLRSYGAGSGVVTRRILTGEEDGSGAADSGGSSASPFFASLANYIESSRKSQDFETISGRLAMVAFAAAVAVETTTGSSLFKKLDTMEIEEAAGVCVAVVACAAAFAWASRARNRIGQMFTLGCNAFVDSLIDNIVEALFSEGELQDWSDDM

SEQ ID NO: 71712 - protein, 88 aa, Zea mays
  Clone ID: LIB3078-049-F2_FLI.pep
SKQDVSRKMNNHPRQVLESYIYITYLKIHSRYPERSTGQAKTQLTRKIRHQQKCPPFICSLKLLAGLFQSSVFAFSSLDCSECHERPR

SEQ ID NO: 71713 - protein, 296 aa, Zea mays
  Clone ID: UC-ZMFLB73149A07_FLI.pep
NALCFVPLVASSPNLRSLKILRCSGAWDLPLEVIAARAPGLVELHLEKLQVGDRGLAALSACANLEVLFLVKTPECTDSGIISVAEKCHKLRKLHVDGWRTNRIGDFGLMAVARGCPDLQELVLIGVNPTVLSLRMLGEHCRLLERLALCGCETVGDAEIICLAERWAALKKLCIKGCPVSDRGMEALNGGCPSLVKVKLKRCRGVSYECIENLKVTRGESFSISLDVVLEHDAGSTSENGAQENGQTQITELAGQMTGMDLLTNAAGTQSSIHTINRMRSVMSAIRRRFGNPLPP

SEQ ID NO: 71714 - protein, 100 aa, Zea mays
  Clone ID: UC-ZMFLB73226F02_FLI.pep
KRSYYTSDQRARGWVNTKQAHSMHLLGEEPLDTEQPGARAAGGADFHPPAANLVPVPDARVHAQVQAPDAATQAGLPAVGNAGGFVLVLPRRCPPVGEQL

SEQ ID NO: 71715 - protein, 382 aa, Zea mays
  Clone ID: UC-ZMROMO17010G11_FLI.pep
VNQCLRDACSISTIPYCDSFIDCGRGIGSGLYRQQWFNDSGAEACFNTGNDATFQYGIYEQAVLLTTEHSAVKRYIYSLFWGFQQISTLAGNLVPSYFIWEVLFTMAIIGLGLLLFALLIGNMQNFLQALGRRRLEMQLRRRDVEKWMSHRRLPEDLRRRVRRAERFTWAATQGVNEEELLSNLPEDIQRDIRRHFFRFLNKVRLFTLMDWPILDAICDKLRQNLYISGSDILYQGGTVEKMVFIVRGKLESISADGSKAPLHDGDVCGEELLTWYLEHSSANRDGGKIKFQGMRLVAIRTVRCLTNVEAFVLRASDLEEVTSQFARFLRNPRVQGAIRYESPYWRTIAATRIQVAWRYRKRRLKRAEKSRLSEETYASLGS

SEQ ID NO: 71716 - protein, 190 aa, Zea mays
  Clone ID: UC-ZMFLB73030B04_FLI.pep
KNYGKATDLLKSEEDRMKLLCELQKAREQRSMVHKEIRSMNECDYIDREIGVLEAEIEDSCISILETDIEKFVRDNTLAEIWEGSAKDLEALLVDYQDCVFQVNLKEEEIKVCSESLQYQARDMDKLQSKLNQAIRELGELLQDRRSLTACSLDEPTLPVGEKVAADLEAVRIHVDEAKQLLILDNQANS

SEQ ID NO: 71717 - protein, 219 aa, Zea mays subsp. mexicana
  Clone ID: UC-ZMROTEOSINTE037A02_FLI.pep
SVFGSVPSTPMQRSVFDSVPSTPTQKPFFDSFPSTPMQRSLFDSGPSRAESPTASSMYGKEQKGFFDSSVPSTPMYNSSFTPRYSEAGDDSFDTMSQYSSFGMHESNSFGQRDSLSRFDSFSSNADNGGNDTFARFDSFRSTSDQGGGNSFMRYDSMNSSSDHDGIGTFARFDSMKSSDYNSRGYSFDDEDPFGTGPFKSTETTSHSPTKHGTNTWSAF

SEQ ID NO: 71718 - protein, 342 aa, Zea mays
  Clone ID: UC-ZMFLMO17108C05_FLI.pep
AAIEASKKDSEGLANIAEQGDQHQEGVNLGEHSSDKAVMRTTDGIVERQVLASGKAGTSRQPIDEESFQEETEDVEEQPLVRRRSRRAPSENTELAQMPHPGASPVLNNHQSSGGDFPSEWGGISSEEHDEAVMLEAAMFGGVFGRPMHPFSMPSHRSSTYYPQITHSSSPALAEQRLLREQQDDEYLASLQADQEKELKALQDAELHRLEETTTREVALKKQKQEQEERRKKQFEEEELESSLASKQASLPSEPPPDAEGAVTVVVRMPDGSRQGRCFLKTDKLKFLFDFLDIGRICKPGTYRLVRTYPRRTFTSSEGDVSFSDLGLTSKQEALFLEQITE

SEQ ID NO: 71719 - protein, 383 aa, Zea mays
  Clone ID: UC-ZMFLMO17109G06_FLI.pep
AMGKASKGSRKGKKAWRANIGTDDIDDFFEKQTRDAHAGTAAIPSLPSDSLFFVDKPATSASTSAAGASDTTTKDIPVKRKIEKKREKVLYHESVLKRNPFVQPIPSSVPGKKDKKIKKKKLQETQGEKSVPMENDSVVKNFDIWAVDGKGDSKAKKRSTISVIPAVEVEPAGCSFNPPFEAHQDSLAQAVADEKRKEYMKELGPTPVPLIVPGEAIAEEDKFFLDAGEGDEDEDAAENGDQDADTSIGQRKNTTKRVTRVEMNRRARRKERLRAEAKAKKMENILKEIDSLPNIMDEIAKEDKEKEKRHKRRTVVKEERRKSGPPRLGRHKFEPAPVQVLLTEEISGSLRKLKGCCNLARDRYKSIEKRGILAPSKRISKRR

SEQ ID NO: 71720 - protein, 69 aa, Zea mays
  Clone ID: UC-ZMFLB73079E01_FLI.pep
TMFFEQKKISNTGKQNFRGHAAFHSMGIREPSDCRKFNADIPSVSCECQTLEFQSRLFIHLSLQHQISR

SEQ ID NO: 71721 - protein, 229 aa, Zea mays subsp. mexicana
  Clone ID: UC-ZMROTEOSINTE119C11_FLI.pep
FRFTDVGKLPPPVLQFVEVKFGYTPDNLIYKSLDFGVDLDSRIALVGPNGAGKSTLLKLMTGDLAPLDGMVRRHNHLRIAQYHQHLADKLDLDMPALAYMMKEYPGTEEEKMRAAVGRFGLSGKAQVMPMRNLSDGQRSRVIFAWLAYRQPQLLLLDEPTNHLDIETIDSLAEALNEWDGGLVLVSHDFRLINQVAQEIWVCENQAVTRWEGDIMDFKAHLKSKAGLSD

SEQ ID NO: 71722 - protein, 481 aa, Zea mays
  Clone ID: UC-ZMFLMO17004C12_FLI.pep
GGPSPRKPAGRRLPYPSRRAPTHRHSLAFPTGEVKKHSPTPSSPIGATGISLAVAWPRSAAHSAFLISRAPRFPRRWISGGLVEMGDAVDDIICATDAAVAVEDAASGKPAMLSSLGGQGEEEHEEKDNEDKSGESEVINPPEDAGGEATSPLEGRKPRLSKGNQSHGPNAVKSKSPTSGDEGQTRKKAPNSSLPKAPIVQVSHGDAGVGSNKDGKNESRSSSVDATLLDDSKEKRKTQKPLAQLFSIKSDEEQSNGESAKPRKVGSIPSYGFTFKCDERSEKRREFYSKLEEKIHARELEISNLQAKSKETEEAELKMLRKSLNFKATPMPSFYKEPTPAKVELKKIPPTRAKSPKFGRSKNKSTPETEENATADQPAHLSLEENVSQNGVKKPTPLNPAKKPQRKSLPRLPSEETGPLVATSRQLIKSAKLDAVSAPETGSATGQVQVQGSETETESGQGPVEAGANPDEQDASEQSVV

SEQ ID NO: 71723 - protein, 440 aa, Zea mays; identical to SEQ ID NO: 56873
  Clone ID: UC-ZMFLMO17004D03_FLI.pep

SEQ ID NO: 71724 - protein, 648 aa, Zea mays
  Clone ID: UC-ZMFLMO17018E08_FLI.pep
RVEVKNSLPEGLAKDDWCWDQSILNIDVGTDDVRDIVFVQKGYWIELVSTHDTNAYIQQPDSSRLDLLIKKGSQRICVETSGQHEIHLTNPCISFGTSSVLFDTANLMPIHINAKKYLVKGEIHVDMSSIQENIDSKDIVVDILKSDGSFIEKISTSLVLGKDNQNDFTAFEYSIWADLGEDFIFVPHDSSIGRNKVLFYPARQQYSVSMNGCQDTVPLITARTGLYLEGSVLPATSDVDIKILAAGKSNYAHLNKGDVATEAKTDSEGSFFAGPLYDDIVYKVEASKDGYHLKQTGPYTFSCQKLGQILVRIYGENSELLPLVLLSLSGEKGYRNNSISSSGGTFTFDNLFPGSFYLRPLLKEYKFNPSAVAIDLNSGESREAEFRATRVAYSAMGSVTLLTGQPKEGVFVEARSESTGFYEEATTDSFGRFRLRGLVPGSTYSIRVAAKDNLQFAAVERASPEYLSVNVGHEDMTGIDFVVFERPEVTILSGHVEGDGIDTLHPHLSVEIRSATDSSRVEAVLPLPLSYYFEVRDLPKGKHLVQLRSGLPSHTHRFESELVEVDLEKDPQIHVGPLKYKTEERHQKQELTPAPVFPLIVGVSVVALVISMPRLNDLYQSAVGMTSLGSGMAPTKKEPRKNILRKRV

SEQ ID NO: 71725 - protein, 532 aa, Zea mays
  Clone ID: UC-ZMFLMO17017F05_FLI.pep
AVSVLTSAKTGYRRRPTPGAEASLSLRRRRSNSQQQQEDTMKLDVNALRYLAKDDFRVLTAVEMGMRNHEIVPAELVDRIARLKHGGTYKVLRNLLKNKLVHHDATKYDGYRLTYLGYDFLAIKTLVNRGVFASVGRQIGVGKESDIFEVATEDGTVLAMKLHRLGRTSFRAVKSKRDYLRHRRSFNWLYLSRLAALKEFAFMKALGDHDFPVPTAVDCNRHCVIMSLVQGYPLVQVKELQNPDDVFDTILGLIVRLAEHGLIHCDFNEFNIMIDDDEKITVIDFPQMVSVSHRNAQMFFDRDIECIYKFFNKRFNLTSEKNEEQAGSESDDEGNSRPSFLSVKKTAGSLDKELAASGYTRKEQVEMDKYIEEDAERHDSSSDDDDDDDDNDKVGDAVSLVSLKIDQDDSAEPDCNLASRDSDVPGTFSEEHETSCSSEKRLESPSGGNGEAMKPLESEGKTLSQKDDNNDDDSSEDADEEEEDAELTKQLNKQRKKAIAAASGRRRPVSSRNAYKGKGTMNSKIQRQACQW

SEQ ID NO: 71726 - protein, 477 aa, Zea mays
  Clone ID: UC-ZMROMO17091D05_FLI.pep
LSHHAKIFKLKGAVAIRLRCTRTGTADFVLEFFLPTDCEALEEQKSVLDSLSGTMRSVCQTLRVVTDREMEDETVLEMNELNSFTPHGKDKVELSFGCNSADRRGEASWTSLAGTSQQESELAALRMHGMFSPGGQGPSLSGVQATAEGSKAKRRTKAEKTVSLQILRQYFAGSLKDAARSLGVCPTTLKRICRQHGITRWPSRKIKKVDHSLRKLQQIIDSVHGAETAFQLNTLYKDITNTSISSDNNLSGSVTVPPTNQSNLTDVNKHQPHKSSSNVPSTSHSHSSCSHSSESSPSCSGGATKHAQQGIIDQMKSENPVKDSSIQTLQTENTSLFEHFSVNETPIDLLQDVTEKANGGHHSSRSPLSPNPKQNTDANMRVKATFGSEKVRFRLNPECNFQELKHEIAKRLSIVDTNPLVLKYLDDDSEWVLMTCDADLQECLHVYKLAGIQTIKISVHLAVSPATRVTTGHTGLS

SEQ ID NO: 71727 - protein, 629 aa, Zea mays
  Clone ID: UC-ZMFLMO17008F05_FLI.pep
VGQLPHRAAWGAPPLLADEMILRPSLLAVARPLSTVAVAAAVRRGDLAGAEEAFASTQLKTTTTYNCLLAGYAKASGLVRLADARRLFDSIPHPDTVSYNTLLSCHFACGDIDGARRVFSTMPVKDVTSWNTMVSGLSKNGASEEAAAMFRVMPVRNAVSWNAMVAALACSGDMGAAEDLFRNAPEKTDAILWTAMVSGYMDTGNVQKAMEFFGAMPVRNLVSWNAVVAGYVKNSRADDALRVFKTMVEDAIVQPNASTLSSVLLGCSNLSALGFGRQVHQWCMKLPLSRNVTVGTSLLSMYCKCGDLNDACKVFDEMSTKDIVAWNAMISGYAQHGGGMQAIKLFEKMKDEGVVPDWITLLAVLTACIHTGLCDFGIQCFETMQEAYNIEPQIDHYSCMVDLLCRAGLLERAVNMIHSMPFEPHPSAYGTLLTACRVYKNLEFAEFAARKLIEQDPQNAGAYVQLANIYAVANKWADVSRVRRWMKDNAVVKTPGYSWMEIKGVRHEFRSNDRLHPQLGLIHDKLDRLQMLMKAMGYVPDLDFALHDVEDSLKSQMLMRHSEKLAIAFGLISTSPGMTLRIFKNLRICGDCHNVAKLISKIEDREIILRDTTRFHHFRGGHCSCGDYW

SEQ ID NO: 71728 - protein, 172 aa, Zea mays; identical to SEQ ID NO: 37684
  Clone ID: UC-ZMROMO17113D10_FLI.pep

SEQ ID NO: 71729 - protein, 523 aa, Zea mays
  Clone ID: UC-ZMFLMO17100H05_FLI.pep
QPPPFLRLPRSAGAPSRYEGDGGGDGGVQDRDLSDDVRGFPSRPPPVASRPRLRTPVLRTPAGDPAFEPAIEIYKMAAVDATTKEMDALHVGQNDETKETLIKEDKAANSNHSVVAAQSLPPEDDDDDEAQADGPSQDGAAAAVKKKKKKNKSKKKKGPLQQTDPPSIPVDELFPSGEFPEGEIQQYKDDNLWRTTSEEKRDLERLQKPIYNSVRQAAEVHRQVRKYMRSIIKPGMLMVDLCETLENMVRKLIKENGLQAGIAFPTGCSLNWVAAHWTPNAGDKTVLQYDDVMKLDFGTHIDGYIVDCAFTVAFNPMFDPLLQATRDATNTGIKEAGIDARLGDVGAAIQEVMESYEVEINGKVFQVKSVRNLNGHSIGPYQIHAGKSVPIVKGGEQTKMEEGEFYAIETFGSTGKGFVREDLECSHYMKNFDVGHVPLRLAKAKQLLGTINHNFGTLAFCRRYLDRLGETKYLMALKNLCDNGIVQPYPPLCDVRGSYVSQFEHTILLRPTCKEVISRGDDY

SEQ ID NO: 71730 - protein, 569 aa, Zea mays
  Clone ID: UC-ZMFLMO17101B06_FLI.pep
AKVPTPSSSSSADAKSIGAVAALKLSDRTCTGVLASHPLSRDIHIESLSLTFHGHDLIVDSELELNYGRRYGLLGLNGCGKSTLLTAIGCRELPIPEHMDIYHLTHEIEASDMSALQAVVCCDEERVKLEKEAEILAAQDDGGGDALDRVYERLEAIDASTAEKRAAEILYGLGFNKQMQAKKTRDFSGGWRMRIALARALFMNPTILLLDEPTNHLDLEACVWLEETLKKFDRILVVISHSQDFLNGVCTNIIHMQNKKLKLYTGNYDQYIQTRSELEENQMKQFRWEQEQIASMKEYIARFGHGSAKLARQAQIKEKTLAKMERGGLTEKVVRDKILVFRFTNVGKLPPPVLQFVEVTFGYTPDNLLYKKLDFGVDLDSRIALVGPNGAGKSTLLKLMTGELVPLDGMVRRHNHLRIAQFHQHLAEKLDLDMSALQYMMKEYPGNEEERMRAAVGKFGLSGKAQVMPMRNLSDGQRSRVIFAWLAYRQPQLLLLDEPTNHLDIETIDSLAEALNEWDGGLVLVSHDFRLINQVAHEIWVCENQAVTRWEGDIMDFKEHLRSKACLSD

SEQ ID NO: 71731 - protein, 405 aa, Zea mays
  Clone ID: UC-ZMFLMO17099B11_FLI.pep
RFSAPVEFDDETPSRHTSPPPVFQTSPIGAPSVSEKRSSTARRLWRGRLLSHPNPVSSRPRRRRSNRRAGVRGPSIDPIPICRRRDQGTATRERLRLLLLLRLLMLRTRGPGSILDPPLGGRREAIERELKKLRAEREELDGRIRLLESQLEAGPAGFNGAAAGKGVGDDACGGSGACQSRVGNGFAPDGSLPADMIYRYSRHLLLPDFGVEGQRKLSQSSILVVGAGGLGSPLALYLAACGVGCLGIVDGDDVELNNLHRQIIHKEAYVGQSKVKSAADACREINSSIKVVEHHHTLKPCNALEIARKYDIVVDATDNLPTRYMISDCCVLLNKPLVSGAALGLEGQLTVYHHNGSPCYRCLFPTPPPVAACQRCSDSGVLGVVPGVIGCLQALEAIKVATGVG

SEQ ID NO: 71732 - protein, 166 aa, Zea mays
  Clone ID: UC-ZMFLMO17101B07_FLI.pep
NWPKSNPGAGGNRNNPGQRGPRDVQPGMEKRVQDQGPVETNRYAARRQPIRGDSSQGIPPQGDRRNENGGRYENQRPLEQQHNRPLPRFNQGGLSQQDPRNERRSSFPLNNNQRQPAGGGDPNRASKSFGIFSSTQKSGSSEQRKLDGNPGNTDSPKSFGIFSSGK

SEQ ID NO: 71733 - protein, 319 aa, Zea mays
  Clone ID: UC-ZMFLMO17101C01_FLI.pep
LKRASHPLFASVPVLSSVPLRCFCSPAQNRLIDHAPFQAPVSMGLLSNRIGRESLKAGDHIYSWRAAWVYAHHGIYVGDDKVIHFTRGRGQEVGTGTVVDIILVSSTPKRSNTPCPVCTDETSDSSTETNGVVSSCLSCFLAGGALYRFEYAVNPALFLAKARGGTCTLAPSDPDDTVARRARYLLSNGFRCYNLFKSNCEDFAIYCKTGLLVAEQGVVGQSGQAISIIGGPLAAVVSTPFRLVTTNIYGMAVMAVGVYCASRYAADIGNRRDVVKMEVEDLTAGLASGRICAVENIAQLVAPEAEGPADATATATLAA

SEQ ID NO: 71734 - protein, 340 aa, Zea mays
  Clone ID: UC-ZMFLMO17099F09_FLI.pep
PRAAGTPASGRSCASWPRRPTRGRRASARRASSKQQHMHVRYIDRCKAAELDQQYVCMYHVPDHGEVAFALAVSADEHGVASAGALPGARRRALVLPLPEPVPGHAALVGEVQDRGAVAGVHHGVQPGAVHQRAHDGLVDLVVQDGPALERVQRADGLVVPVRLVAVVVRHLRADAREVEHQGVAVAAALHQPVHRHPDVLLRGQPERVPLVVSEHDDALAGEAEALAEEVPHALDVVDGASQVAAAPARAGVRDADQDGALLAPGALERRRHVRRPRQRDAVGPPDAGHAVALRALDGALAGDHAQARPAVLAPDRRVAIPTEIHGCLLVKPGASDLIT

SEQ ID NO: 71735 - protein, 506 aa, Zea mays
  Clone ID: UC-ZMFLMO17100G05_FLI.pep
QKCPNAASQIDFNGVRRPQRTTSSGSFGSFDGSSVSNKSIESGYPPDAPTEKSVHCAVNHQTVPSPEACSTQQYTSPSDNHNLIPHKPADLGSQIVATRKPVQHSCAQIENVVPMHAPVQPTTSTPLGLFDQSTVQQPVTSAAPIDLFAGFNEQLPASHNTDGVSSHSVVAKEPVHNVVQKGIMPSAEALATSHAVHQDLFSLSILQKPATPSPSQPIDLFAGFDQHLPHLSTVQKIPSAVPLPANDGWAFFDVQHGLLTSVSNVQGQVPAAFSPSDGIAKGIDQLTLPTSPPNVIGSQRSPAMMDNWSLNAEEVKIPVLNENSQSWNAFGESTQSASNDLFTFNTMSQVEAHQFSMPSGPYVESRIPQDLVRDEPERPTPRDVFSGFNISHVEVVGSSSPSLQPHLGGMVSHPEKSTNPFDMAFESDVDANDMFMDLTSLQETLPDHHTLTDYSGSLTEPWISQNSTMSYIPSGPQGGLSYVAGQDSHMLSSTHQGAFPPRNPFE

SEQ ID NO: 71736 - protein, 298 aa, Zea mays
  Clone ID: UC-ZMFLMO17100G12_FLI.pep
TNSSSNEYDVYGFEDAPVSTSSKDDEQDLSPVAQSAVEHVPKRGRERAYNKRPNQIVPGKAKEPPKRKRTRHSSTVTEPDAHRVVDAPENSRNLIPDMNRLDQVEIPGTSNQIVTFDHGGTTTEALQHRGDAQVQVHPPGAEVNSFYSAPTANPTPISIYMGDQPIPYQNNDSTRPRSENSFPVDAHTGLNNLPSSYQNLPPKQSLPLPMMDHHVVPMGIRAPTDSIPYGDHILGGGNSTSVPGDMQQLIDFPFYAEQDKFVGSSFEGLPLDYISISSPIPDIDDLLHDDDLMEYLGT

SEQ ID NO: 71737 - protein, 532 aa, Zea mays
  Clone ID: UC-ZMFLMO17102G04_FLI.pep
PGRPTTPLTLRGRPRDLSTTSPPAPARRPRGGPAMKGSSHSQAGAQAVRRRRWGCLLPLLVGAAFLAEIAFLGRLDMAKNAEAVESWTTSFYRRSADLGDAVGGGAASRAGGDSEDEEIRLCEQRLEREDAVPYDRDFDSDPVLVGGAAKDWNKCYVGCEFGFSASKTPDATFGIAPDPSVDGILRSMESSQYYSENNIDVARGRGYKIVMTTSLSSDVPVGYFSWAEYDIMAPVPPKTEEALAAAFISNCGARNFRLQALEMLENLDVKIDSYGSCHRNRDGKVDKVDTLKRYRFSLAFENSNEEDYVTEKFFQSLVAGSIPVVVGAPNIQEFSPGEGAILHIKELDDVASVAKTMKNIASNPDAFNQSLRWKYDGPSDSFKALIDMAAVHSSCRLCIHIATKIHLKEERTPKFTNRPCSCSTKKGTIYHLFIRERGRFKSESIYMRSGQLTLGALESAVLGKFRSLNHVPVWKDERPPSIRGGDDLKLYRIYPVGLTQRQALYGFRFRDDSELEQYIKDHPCAKLEVIFV

SEQ ID NO: 71738 - protein, 392 aa, Zea mays
  Clone ID: UC-ZMFLMO17103C09_FLI.pep
CWQTDYCTDEQQINGTHCCFLPLGFFSTGNLAGEFQSCCPEPSLSLVGEPGFTGGDTLSLDTRRLNDSTRSLALVAFFSFSLASTFLSARRTFSETWFLSESVTISLSAISSFSSVALPFRSSVLSMALISLEVVSSTVTLSSSMTFVFSFCLLLSASSVPCAVVFSMDLGSAVVSSPCFLPSTVVFSTDLGSAVVSSPCFLPSTPPMLAVFSFCLLLSASSVPCGVVFSTGLGSVASSVPCVVVFSTGLGSVIVSSLGLSSALPMLPMVPMLEVGSTASSLIFFSSSAPSLVCATLVSCDRGSARVLSSLLPSSGLSVDVGKLNLSTVGPDMVSSHIFSLTLSGPCTIISSRESRSSFTSSSCIFSSLTLLSAMLREIVPKVISSLGNLSS

SEQ ID NO: 71739 - protein, 585 aa, Zea mays
  Clone ID: UC-ZMFLMO17108G12_FLI.pep
SPPVHAMACRATLLPLFLFLFLLVAPAPALATSGTIVFTTLGRSRYAFDVFALPIAPLSAASAELRLTDGTSVNYNGNFAPSSSGPPSLLFVSERNGSLNLYLTPVPTSASARRRDALEEEDVTAPPTPLLPWDPIALKDRPSLTPDGAHLVYVSTAEPAGAPRRSWAAVYSTSLAPGGATRRLTPRGVADFSPAVSPSGVWTAAASPGPRGWAGEVEDLRTDIYVFRTSDGSRRALAVPDGGWPTWADDTTVFFHRRDADGWYGVYRARLTFTDDDVASVVDRITPPGFHAFTPAASPGAPGLVAVATRRPGSDYRHIEVIDLSGGGGGANNRSAYYEVTRPVAPRAHHFNPFISPDGERVGYHRCRGSGNGDSPLLLESIKGPAPDTFSLFRIDGSFPSFSHDGKRIAFVGLPGLYVVNSDGSGGRRRVFSGNAFPTTWDWKRKGVIYTSVGPDFASESTEVDVVAVSLGDGDGDDPSVSIKKLTVGGENNAFPSPSPDGKWVVFRSGRSGHKNLYIMDAEDGEAGGIRRLTEGPWSDTMCNWSPDGEWIAFASDRHNPGGGSFAIYMVHPNGTGLRRVVHSA

SEQ ID NO: 71740 - protein, 795 aa, Zea mays
  Clone ID: UC-ZMFLMO17109A07_FLI.pep
GSAEESNHSPAARPPRSPSPPHAARGVADPAKGKPRTGARRPVAGVVVAASRAAALLLAPALDRAAVGDSVWSAAGHCAAAPSRPTRRRHQVSNNLKYREMGARDNGEGRDEKRGTGSDYVPARDSFSSQGESRVPKRLGKKESKDNSPRTTKSSASRQAQNKLQHKGLNNVQNKPQKQKKTVSAAKAVDVRKPDITRIPSRPPSELSEETDDIISDAGTVDDRGTEEAKEINVLDEAPRCDQSTGTDDEIPDIEDKVVDHGKSVVDQGNEELVLKIDKLEQELREVAALEVSLYSVVPEHGSSAHKLHTPARRLSRLYIHASKSWSEDKRASVAKNIASGLVLVAKSSSNDASRLTFWLSNTVVLREIIVQTFGISHQFTPSMTNMSMNGGAKKLDGKSMTMLWRNNYNGTQAKFAARLMPDDWQETSTLLAALEKIESWIFSRIVETVWWQALTPHMQKRAEGSSTPKAGRVLGPALGDQQQGTFSVNLWKAAFHDAFSRMCPLSAGGHECGCLPVLAKLVMEQCVARLDVAMFNAILRESASEIPTDPISDPIVDPKVLPIPAGDLSFGSGAQLKNSIGNWSRWLTDKLGIDHDDSEDIGDVEDERRAAAETKSFQLLNELSDLLMLPKDMLLEKSIRKEVCPSIGLQLVIRILCNFTPDEFCPDPVPSTVLEELNSESLLERHTNKDATSVFPCTAAPIVYHTPSTLDAAERAADIGGGAKLDRKASMVQRRGYTSDDDLDDLDSPLASLIDRSAPPSPSNGFAHFSARRGVSMENTRYTLLREVWGLEQR

SEQ ID NO: 71741 - protein, 302 aa, Zea mays
  Clone ID: UC-ZMFLMO17109B02_FLI.pep
NKLPRSNEHEPWQNEAEVVRCEPSMANAPRILALGLLLALLCAAAGPAAAQNCGCQPNFCCSKFGYCGTTDDYCGDGCQSGPCRSGGGGGGGGGGGSGGANVANVVSDAFFNGIKNQAGSGCEGKNFYTRSAFLSAVNAYPGFAHGGTEVEGKREIAAFFAHVTHETGHFCYISEINKSNAYCDASNRQWPCAAGQKYYGRGPLQISWNYNYGPAGRDIGFNGLADPNRVAQDAVIAFKTALWFWMNNVHRLMPQGFGATIRAINGALECNGNNPAQMNARVGYYKQYCQQLRVDPGPNLTC

SEQ ID NO: 71742 - protein, 115 aa, Zea mays
  Clone ID: UC-ZMFLMO17109G10_FLI.pep
QKRSFLNLPFNGQNPIFMQMRNEQPTNYFCCASPLFWASNLFLSIFLLSITPSYSFIIKKYCFLLSITPSYNFIVLHNVDVDIDIHPDHLNASSYQSKLRFLFLIQSRLVSLKPI

SEQ ID NO: 71743 - protein, 203 aa, Zea mays
  Clone ID: UC-ZMFLMO17112F07_FLI.pep
LLCEGQGDAGDNSLQPFRRRPHSENAKVPARLLPRCEQRLHPLGDVRHWGQRGANHQQPGQSLPCSDEPVRQGGDQEGGDCPDRVEELELEVRGRPAAERRLLHPVRRGRLGQLLARVQPRRQVVVHGRHHHLGRRCTVVPQGRGLLARIALPLQQQEKKQDNNRKLSHINTTTTMVTVSSSLSLFFLGVAFDKGYIIYDGPP

SEQ ID NO: 71744 - protein, 276 aa, Zea mays
  Clone ID: UC-ZMFLMO17122B10_FLI.pep
APRSTSRHPRPPSARVWRLPRPRSPLCCPRPLLACLPATHEQSLRPRIPRPRAELLSMPSDPLLPRKENLQILPPSPPTICARWPSTGYAHVTVVGSQVSPNSKRPRFERRPQQDVRIYASPSSRGRRRWIQGHQRRPSPSSPNGRRGDVLLVHTKCAVHTKLLANDFLLFSMAASSARHRCLRPCCANKCSKKMEIERQMATAKLFAEEQLAEDVALKRGIFVGAGCFAEKKIPIMEIHGAKCYLIYQLPSLGFFLLATCNESVVSTFCWFIQGF

SEQ ID NO: 71745 - protein, 393 aa, Zea mays
  Clone ID: UC-ZMFLMO17300B01_FLI.pep
FLRLEGSRAARAPNQAPPASCPRPCARAAVVLQVPPPLRRGSPPVIPFMAGRSDKKPASSAPPRKGGYPHGSVYGSSSEPRKQDACTFSPSVSSKDSLHKVVTLTPVQPQKPVDSRGSHCNAGSDSGEAPFDICMSGNKCAVKLKPSIFETNRERKQRDRECSKDVGPLQLRPGMVLLKRFIKPNDQVKIVKLCSQLGVGPGGFYRPGYRNGALLKLWMMCLGKNWDPDSSSYGDRRLFDGAQPPTIPEEFQKFVQDGIQASHEFLKQQKGATNVVQEIPAMSPDICIVNFYNSSGRLGLHQDKDESQSSLDKGLPVVSFSIGETAEFMFGDDRDEEKISKVDLESGDVLIFGGESRLIFHGVNNTKPKTAPKWLTDETSLRPGRLNLTFRQY

SEQ ID NO: 71746 - protein, 414 aa, Zea mays
  Clone ID: UC-ZMFLMO17001D09_FLI.pep
GFTGEPRSGEEARGFGREEGNRVWCSGDLDEYRVRRACASSCADFIYGFCETKAKGKGAEEYWLIWRFEGEDTLYDLMQSKEFPYNVETKILGGIQDLPKGIARENKIIQTVMRQLLFALDGLHSTGIVHRDIKPQNVIFSEGSRTFKIIDLGAAADLRVGINYIPKEFLLDPRYAAPEQYIMSTQTPSAPSVPVATTLSPVLWQLNLPDRFDIYSLGLIFLQMAFPSLRTDSNLIQFNRQLKRCDYDLQAWRNLVEPRASAELRRGFDIMDLDGGIGWELLTSMVRYKARQRTSAKAALAHPYFNREGLLGLSVMQNVRLQLFRATQKDYSEAARWVIGLMARSGTEDVGGFTEAQLQELREIKPKKSSTQRNALASVLRLQRKIMRTIKESMDELNSQRKSIWWSRWIPREE

SEQ ID NO: 71747 - protein, 149 aa, Zea mays
  Clone ID: UC-ZMFLMO17009A10_FLI.pep
RHMATLELGKRVHQLSRGGVQAGAIRLKRPSVWLPSRLPATPPILAHSTRLPHARAPFADCIPLARHAAVCVHEEGKEVILMQKNFLSGRWKRIVHTTQGGRQWRRSYPPRVGLFVASDGVWNAPCREGGDGGDHTLVPPPPLWLRAAS

SEQ ID NO: 71748 - protein, 299 aa, Zea mays subsp. mexicana
  Clone ID: UC-ZMROTEOSINTE004C06_FLI.pep
KSASYKLKDRTGLESEELDLWQYENTAEAAKTICSTVKFLWSAMEPHLLQVLACLSFAGLVAALYRYYQRSRECCNCIITYDSLAEQPLLVQHQVAQLSVTSVRDAQLPVHSSEQPIQLAIPNQGTAGSLEVPMELTLPKLDPLVSLEDPAQESLPMTDPLVTVKIPVIGRGIHDQKLKRGDSENIKASNGMFLNHSDVDSSKPPVVELLGEFVLASSSRERSTKKLYQNAGDATDQKLLKPLKKDEDVEKMQMHSSIIQSPSVGRAKKEEKSINREKTDATPTPLRRSSRLRNKVTSP

SEQ ID NO: 71749 - protein, 334 aa, Zea mays subsp. mexicana
  Clone ID: UC-ZMROTEOSINTE014E03_FLI.pep
SLMMRPWTVRLANTIQTQVVLHLRRPIPRWNLAKNKASPLEIKKDVVLLDDDDDIEPARSADVQISNKWEESNIHYPSSTDPEAVELTYSDMKCLEPEEYLKSPVINFYLQYLKKARPRRDLHMFNTYFYSKLEEALSKPGHHDSEFSKLRRWWRGVDIFKKAYIILPINESMHWSLIIVCMPTKEADSGPIILHLDSLGLHSSQKLFDIVARYIQAERWHLRMDSSYDIPFSGRIWRRLSKNINREKIEVPRQRNEYDCGLFMLYYIDRFIQDAPERLTKEGLGMFGRRWFNHEEASAFRGGIRALLIDLFHSALDDDGPSEAELEDKDIQMD

SEQ ID NO: 71750 - protein, 351 aa, Zea mays subsp. mexicana
  Clone ID: UC-ZMROTEOSINTE028D12_FLI.pep
VRNGYTRYTPNAGTLELRKAICTKLQEENGVSYLPDEVLVSNGAKQCITQAVLAVCSPGDEVLIPAPYWVSYPEMARLADATPVILPTNISENFLLRPELLTDEINEKSRLLILCSPSNPTGSVYPKELLEKIADIVKKHPRLLVLSDEIYEHIIYQPAKHISFASLPGMWERTLTVNGFSKAFAMTGWRLGYLAAPKHFVAACGKIQSQFTSGASSISQKAGLAALNLGYAGGEAVSTMVKAFQERRDYLVKNFKELPGVKISEPQGAFYLFIDFSAYYGSEVEGFGTIKNSESLCIFLLEKAQVALVPGDAFGDDKCIRISYAASLTTLQTAMSKLKEAVALLKPCVAA

SEQ ID NO: 71751 - protein, 469 aa, Zea mays
  Clone ID: UC-ZMFLMO17117H12_FLI.pep
RIPPRRRRGPTVGRGGEAGVMEAADHGKLFVGGISWETSEDRLREYFGRFGEVTEAVIMRDRSTGRARGFGFVVFADAAVAERVTTEKHMIDGRMVEAKKAVPRDDHSIVTKSNASSIGSPGPGRTRKIFVGGLPSNVTEADFRRYFEQFGVITDVVVMYDHNTQRPRGFGFITFDSEDAVDKALHKSFHELNGKMVEVKRAVPKEQSPGPAARSPVGVGQNYAMNRVHSFLNGFNQGYNPNPIGGYGIRVDGRYGLISGARNGFSSFGPGYGMGMNVEGGLGGTFGASSGFISNSNGRQMGSYFNASSNRLGSPIGYLGLNDVPGSMLSSMSRNVWGNGSLNYPSNPTNMSAFASPRNGGQVSLPSDNWGGLPSAHGMDNISSLGSGNLGRGTGDNNFGLPSGSYGRNNSTGTIGEPFSAAGNTYEVNNRDTYGSSSIYGGTAWRFASSEVDMPSFVHDIGNVDPTIK

SEQ ID NO: 71752 - protein, 132 aa, Zea mays
  Clone ID: UC-ZMROMO17006G12_FLI.pep
AFLCSHLGGCRRDFRFYRLIIIHHRCSSPHTSLRSVYLVFSMETPLRALKCAKPFDGEGGALLSIRDARGESRSSRSSSLVYPLLCTIEAFLSSFAPPPMSAALSAASNVEGVWYTIGAAVHGNTLVASLLV

SEQ ID NO: 71753 - protein, 464 aa, Zea mays subsp. mexicana
  Clone ID: UC-ZMROTEOSINTE010D10_FLI.pep
FSNKVASTQKASAGPIHKRSSRTASSGYANRRNPPENPLAQSVPSFSDLRKENTKPSPGVSRASARVQQKSFARSKSIIEESKSILKEDQSRRSQSMRKNQIPDELKDISSGNDDIYNWAPSRISKNQSEGPFAYSTRRSGPPKPFLRKGNGTHPVIGIAGFQAAAAMMANALQHGDSGDFEDQQEDSPDDAKEEEEYESMEENLRESDFPADSDSENPRVSHEFGNSDDPGSENGDADFPSKAPAIGGTKFTAFTGNVHNPAGDVPAPWSSRLPQLFPYTNDNSDGDAFADSPSGSPSPWNSHSLYEITDADVSRMRKKWGSAQMPFAGVNAPQQPRKDVSKGLKKLWKFGRKTRGGDGLVNDWVSASTASECDDDMEDGRDLVVGSSDDFRKSRMGYLASYDGFVENEVFSEQEQSLRSSIPNPPANFRLREDQLTGSSLKAPRSFFSLSTFRSKGGDARLR

SEQ ID NO: 71754 - protein, 224 aa, Zea mays subsp. mexicana
  Clone ID: UC-ZMROTEOSINTE011B05_FLI.pep
APPTAVVENLGGITSSSKKPDENRVLDASQIGKAEAVNIQFGPFGISAWMSDTGGTSHAGSVEDLRADGVETGGRNYSSCCSSPKTSDSTSKELMEDYSVYVSEEEEEEEADDPCDAETDEDLSDEERDMHEIDAGSVDEHSTKSDEEYEDLAMRDVMESGDWSDDEQQGVSKTKNSPTLECSIHGSGAAEDDGINGRYHHNLDLFLKMSKEVVASNRMPCASS

SEQ ID NO: 71755 - protein, 127 aa, Zea mays subsp. mexicana
  Clone ID: UC-ZMROTEOSINTE020C08_FLI.pep
QGRAHPFASQLCCAGTCGEGGRSLAERMPLGLTLGSLGRAMRRKRLSSLDILSSKRAPRDYYKGKNCKPTGFHTRKGGYVIVDEKLPRFVVPDLTDFKLKAYVSQCARDLTASTASSTSAESTESKS

SEQ ID NO: 71756 - protein, 184 aa, Zea mays subsp. mexicana
  Clone ID: UC-ZMROTEOSINTE021C06_FLI.pep
VSKNLEDENTHCVVSVARNVSASWICLRSRLTLHVGGVLLFATAARDEGHELEHDVHGVLRRDVEERGGLVADGGAAAGEVGEGADGDEGDAVLVRDEGHGGALHLHGGAPEVGADELAVAGVVGVDVGAAAPGHPRHPGRAGQARRRVHARRQLQPLQLPGERVVALVHGHPERVLPLLRRAG

SEQ ID NO: 71757 - protein, 330 aa, Zea mays
  Clone ID: UC-ZMFLMO17127C11_FLI.pep
KSHYYGRTILHGGAKYRATGRGFVVQHKSFAENYRLYARSHFIKAIELGIILTVYAAHSVIAKNTLVYIIMNISSWFLVVSWIMAPFAFNPSGFDWLKTVYDFDDFMNWIWYPGGLFSKPEQSWEVWWYEEQDHLRTTGLWGKILEILLDLRYFFFQYGVVYQLKIANNSRSIAVYLLSWICVAVIFGLFVLMSYARDKYAAKQHLYYRVVQTAVITLVVLVLVLFLKFTEFQIIDIFTSLLAFIPTGWGLISIAQVIRPFIESTVVWDSIISVARLYEILLGVFIMAPVALLSWLPGFQEMQTRVLFNEGFSRGLQISRILTGKRTNTV

SEQ ID NO: 71758 - protein, 322 aa, Zea mays
  Clone ID: UC-ZMFLMO17127H02_FLI.pep
RSSPTPCRLSLSGPACRKLARRLHRPLPAPQAASHRRGAATSPGSEGFGSARRAPLRTLLLAWRAAEIHQQFGLLLLFLGYTWSPRCWLGNPAFQSVIGQVYFGSEMADEDSSDFTFCRVSSAENDGQPESPKAIPMASMTLEDVRVKSADTSKNNGMKTVDSEKDRSGNNVSVSTKDDNMKAPVTHTGSGAESNVPLQAKRSSKKPAARAKVPFEKGYSQMDWLKLTQTHPDLAGLKGQSNRRLISLEEVKQHKAGDCIWTVLKGRVYNIAPYMKFHPGGVDMLMKAAGKDCTALFNKYHAWVNAEFLLEKCLVGFLDPTA

SEQ ID NO: 71759 - protein, 173 aa, Zea mays
  Clone ID: UC-ZMFLB73152E08_FLI.pep
AGTATSARRRGRRRKGRGRCRARTREEEGAASLGWRHWRRRCLFGSAKDITKSENAYSRKRKNLFAYIIMYGNSHEPRAAQVYETAAPKRHASLSRNSLVTLASSSSRSSSSISIEEHELPEHLDSPRSPDGFISAPRSGSCVPDASVPRSLSMMDLHRLNRSSSSVRLKDGK

SEQ ID NO: 71760 - protein, 259 aa, Zea mays
  Clone ID: UC-ZMFLB73159E01_FLI.pep
GGILYTKLRTSIRDTLCQVSAMDNLKTHSEYADQPQGPQANAVSFALPTGQVLDLDSHMIGQQHTNLSSFWFSLEQHRLQLDQALQLHNQQLQVSLQQQISMQNSTLLNLVESMTRDVLMQKNDEIASLRVELQRNQEDLETTLHDRDEWMKVAMAAYEINQTLIRMLRTVQLEANSHVSSNDLDAPSYSEASSMARTALETAQPNLICKVCNSGNAGVLMLPCQHLCACKPCVAWLATCPICGAVKTDAIEARFVYKK

SEQ ID NO: 71761 - protein, 426 aa, Zea mays
  Clone ID: UC-ZMFLMO17125C04_FLI.pep
LSTEVVLFFPSLRRAAPARRGDFAAKLTMISPERSSSQSQRSAAAGAPFLSISVTDPVKMGTGVQSYISYRVITKTNLPEFEGPEKIVIRRYSDFEWLHDRLAERYKGIFIPPLPEKNAVEKFRFSKEFIELRRQALDLFVNRIASHPELKQSDVLRTFLQADEEIMDRARSYETGIFKKPADFIQMFKDVQSKVSDVVLGKEKPVEESTPEYEKLKNYIFELENHLAEAQKQAYRLVKRHRELGQSLADFGKAIKHLGACEGDLMEKVFSEVGSKSEMLSIKLQREADNLLFNFEEPLKDYVRAVQSIKATMLDRANAFRQHFDLDQERKYKELNLEKLKFMNPEKYAEAESEFRELKADSEEATKKFEHIVRLMNEELARFQEQKTADIGLAFHEFAKGQAKLAKDIADAWRSVLPKLEACSTS

SEQ ID NO: 71762 - protein, 320 aa, Zea mays
  Clone ID: UC-ZMFLMO17130E05_FLI.pep
LLRPLLSTAPASRGGAELRMPRTTVVESPGCPPLRALTTDILGLVKVVEAHARPAGAAKVVETWGAPDASCAIVAASLADRATDPVLAVARKNGVVELLNPLNGDTLAAVKAVGPAPNDGGAEGDPLTALHLFTRQASDSILGTFLACTEQGKASIRSITKENAASGSHIEPSATWDVCGGANVQFCSVDHGENYVMFGGKGIEVSLWDITSCSKTWSAKSPRTNSLGIFTRPWFTAGTFLCKDDHRKIVACTNSHQVRLYDTALQRRPAISVEFKESPIKAVAADPNGHDVYIGTGTGDLASFDMRIGNMLASCYMFSS

SEQ ID NO: 71763 - protein, 278 aa, Zea mays
  Clone ID: UC-ZMFLMO17150H11_FLI.pep
TEIYRKNENAVEVGPSPLCKGFYGETPEKLYYKAKTDEGKAETLHRSYRQRKRSQRYTKDYVEAISDIDLDFDSDDDIMGEAVYDEEYLRRRKRYKASLSENDDEFQLDQVANDGDDEVGTSLNVNEDTKDLQWYKRFPLLTPQGTKLKSIDEIQTGIRRSKRSTRSRINYRQLDTFGANTKYGKSEKCNASDPDASSDALNDTELSTSQDREEEDGVNKAQQQYTEKPIVPVKESRSVRRKFLVLNELVPIAGFDDASVLVKDKHVNNNGGKCSAAH

SEQ ID NO: 71764 - protein, 116 aa, Zea mays
  Clone ID: UC-ZMFLMO17128D06_FLI.pep
FLQNKRIQTTPKRKYEMQNRESVTPAPASQWTSRLATAGSAAALSSDWRRCWTGPWRHGQASVQRERDDGRLGLPYTSRPYYSLHWFLRASTQRCGASFTPFPSLKPHLCNFFLNL

SEQ ID NO: 71765 - protein, 76 aa, Zea mays
  Clone ID: UC-ZMFLMO17299B01_FLI.pep
NMFIFYAHSPVIVISAKAIWRTGGGYKAEDGSKQQHPKYCNVNVEGSNIKALIWMQMEKAPADHSVHNFDELDAQY

SEQ ID NO: 71766 - protein, 215 aa, Zea mays
  Clone ID: UC-ZMFLMO17140A05_FLI.pep
GGNAYLFQDAEVILSHNWAIPKELWIAHYLAEQKLTDSKQRSAIMAEIKYLMSGYEKKQRSENLSTWASQHPPTESKRRNRKRKEEEQEHHEAQYNQQQQEQNENKLIQGKRHQLHQENMAQVTQQQQQHMQPTTRPATLKLPTPAIPLVLNAAQIQNFARPAYAAVPGVHNYPAQPGWSAAQGSPFVPQFMSPQYMGLPFNPFGLHPTCYPRRR

SEQ ID NO: 71767 - protein, 288 aa, Zea mays
  Clone ID: UC-ZMFLMO17168F04_FLI.pep
QMASFPHLTQMEHGLASGASHGTPSFFFCHGTATADSASLETSSGVLDTSPRGTSSDDNKACRKHKEDSGASFSSARSKDSNSKESSKRSGGKRDRSSKKVDEEEPKGYIHVRARRGQATDNHSLAERVRRERISERMRVLQALVPGCDKVTGKALILDEIINYVQSLQNQVEFLSMRIASLSPVLYGFGMDSSDAFSDLITQKIEGMAHHEAFAMPSSSVLNGTPSEALVDTHTSSSSPSYEVHGDGGTASVSFPQDSGSYMVQTVGEPRQELFSQVVFSNHMCPFQ

SEQ ID NO: 71768 - protein, 367 aa, Zea mays
  Clone ID: UC-ZMFLMO17306C04_FLI.pep
KRYGGQAQGSRGPLDGSCDEPMPLPHPMVGFNLPDQWSRRVDRSLPAQAIGPPYFYYENVALAPKGVWTTISRFLYDIQPEFVDSKYFCAAARKRGYIHNLPLENRSPLLPIPPKTISEAFPRTKRWWPSWDPRRQFNCLQTCVSSAKLLERIRVALTNSSDPPPPRVQKYVLEECRKWNLAWVGLNKVAPLEPDEMEFLLGFPKDHTRGISRTERYRSLGNSFQVDTVAYHLSVLKDLFPQGMNVLSLFSGIGGAEVALHRLGIRMNTVISVEKSEVNRTILKSWWDQTQTGTLIEITDVQTLSSERIEAYIRRIGGFDLVIGGSPCNNLTGSNRHHRDGLEGEHSALFHHYFRILHAVKSIMERL

SEQ ID NO: 71769 - protein, 267 aa, Zea mays
  Clone ID: UC-ZMFLMO17317D01_FLI.pep
TSKPAKQFPSQCSSGDGEARCSGVHATRRRTYLFIGSALLNVQRKGSSRWGLPVPTGHSGVDTPSPPFFSSCLCKLTLGKYLVRRLLGATTTTTTTRMMQKRWEGKISVQEQAAGPPSVRARARACVQVNKIFPPGGRSPRFLSLGSGHQLWSGHIFLLFSRQVALAPCVSLRVWLTAERARIWAGLPDNACFCAGGSAESTATADWGWGTGGFRFRLPGADDNDGRAGGDTRLRAANCETDFFFAWRTGSTFCFVFLWLPTEAKCI

SEQ ID NO: 71770 - protein, 431 aa, Zea mays
  Clone ID: UC-ZMFLMO17044F11_FLI.pep
ADCAHLTFGSFVYGTLDASLTTKPLESHGDIVTIPDDDYDQSEGRIHDDESKVTLAPAANEYVTSTSNSNVENLDITSVQQSEVTRSNFLDVTSNTEYNLSSPPDYATSSAALQDSTSQSYLQENRQFQSISPLPSFMQIQNGLMSPAIPPLREFDPAFSLLLTNPPIMHGTTSSSMSSATVSTQPQENANPVGLPNPQLTQSQPSTSIAPGPPLPQHLLHPYAQTTLPLGYASMIGYPSLPPSYAYLPPAAFQQPYMNSGMFLQAAAAVPNSSVKYPLPQYKSNIALASLPQPGSLLSSYVGGFGTANNMPGNFPLNQSTTSATATLGFDGTVPSHLEDGNQFVCLQQNENPAMWMHGAGSRGMPPLAASTMYGYQGQSHQTGLRQGQLPSQYGSALGQSQPGLGPEHRNPSDSNLSGAAQANQMWPNSY

SEQ ID NO: 71771 - protein, 76 aa, Zea mays
  Clone ID: UC-ZMFLB73285E05_FLI.pep
IWHSFAIFCFFMCQAMMVKQSCRHRVLPGTYRKFICQSASCSPIPCNACYRDLFLQLNIPCKAGTNRSCICKTRGL

SEQ ID NO: 71772 - protein, 124 aa, Zea mays
  Clone ID: UC-ZMFLMO17099G08_FLI.pep
GLRHFFRSSRGRGKSKRVWTYFEDEALVKALYELSLDPKWKSEGSFKNGYLSVLEVTLAEKIPGCGLTSIPHIESRVRHFRTKYGAIEVMLANSGFSWDENRKMVQCEKQQYEDHCKRYPDAKR

SEQ ID NO: 71773 - protein, 264 aa, Zea mays
  Clone ID: UC-ZMFLMO17209E01_FLI.pep
KVQKRGKEGGRRARNESHPPRPPPTALKCAPFFFRVKPSGCLIAPRSKLLLQKASCSFAPPRAVGWLLARSGWAASVARLSPAGERAMHIATCVWQEKASAGGMGGAAAGGGCVGGEWGAARAKVASALGVAGCALNCAVSFVVFSALDVLDVVLCLVYKLVDYAAEAEWKSCYCAAASGPRAAQLPLAAAPPAAGGPKVVRLSASSAKLQLEDVSDTLYVRPSLLADATRAGNGSGSGSGVAPALTVSPAIAELIRGKMDRAP

SEQ ID NO: 71774 - protein, 61 aa, Zea mays
  Clone ID: UC-ZMFLMO17307F09_FLI.pep
SVLPVHLIQASAQSIFSEHFCSNNSVRLSPTDPLSHLLFQTILRPLFYTTLETVFSDVIQI

SEQ ID NO: 71775 - protein, 371 aa, Zea mays
  Clone ID: UC-ZMFLMO17300B05_FLI.pep
SASLSATSRPGSSSGNVPGISRATSLSSSSVPSMSRSSSRSSTPTRQPAIRSSAPAIGRSPSVGRTSSINSFTTSSRSAASTGRNSAPSSAPSSRPSSPNPRPRAPVRPLDIPDFPNETPPNLRTKLPERPPSAGRSRPGMALGIRSTPNTEPSAASAPVKKISVPAVSRSKFSDASSKTSTLTNGHQNRQADRSNIDSQANRPSRPSTGTTDNGFGRSISRRSLDMAIKHMDIRQNLGGIRGTSLFPQSIRSAAAKVRPARASDPGHGISNGDQRYSDNGSSVNGHLSGDSNGVLSRNGGSSTDSPDRGSIGTKETLSELDIYGSSRYEAMLLREDVRNTNWLHGLDDKPDQSPLFDHRFEPLPEPFSPL

SEQ ID NO: 71776 - protein, 131 aa, Zea mays
  Clone ID: UC-ZMFLMO17303F06_FLI.pep
DAGAAEADEMVMWPPAPILDLARLAVDSGGDPGAIHRALDPTMLPVPDVEGSQKNKCHLTRTPYGRRFANEEINSYFAFLFELIVARAPSVGLNVSLNRYDLFHGHLFLASETGRLGILSPAYSRKRYKTS

SEQ ID NO: 71777 - protein, 440 aa, Zea mays
  Clone ID: UC-ZMFLMO17306G10_FLI.pep
AASVHRHGDYHYYHPPPPPRRSHSRLGGRPLRVPQRAPAVPVPARVHHRARPRRRRAAPLPLIQGGLVRRRHLRSRRLRPDSALVRRPRGARHPGPAAAPRARHQRRRHLVALRAVRHVPRRQPLHPGQLLLVRLPPVRLRLVPALRGPAVPGEPGRLGAAAGVRLLKAVRGHLVPGVAGQRHAAPGQGRHRRLRVRVRGRGGRADDQPAEAGAPRPRPGPHVSAVPDREQVQRRLLLLPAQLQVLLLLRLPPAGRRRAAQERPVHAAADQPAPPVALLRERDGAQRGADLGEGPRGVVRVRPGHRRRHGDRLGHCDHAVDGACVRGAARGVPAAGGGAERVHVAGRVRHVLQHGRGGGGRRAARDAAHGRRRGPDAADGEHADPQQRHAAGVPGHGRGAAERERRRERGGQPSAAERAGRRRRRRLARRVREGALQLSP

SEQ ID NO: 71778 - protein, 320 aa, Zea mays
  Clone ID: UC-ZMFLB73366G03_FLI.pep
YSLLSHYPARQSESAVSPVYPSLHRCLDPRRKIPFPPFLSRRRFGATMAAEGEAKNPSGGGEGGNPQHQQAVQAAPAEPPTAQGEAVQEAGAQATGQEPEGEKANRDGEGSAGEKDDGACRDLVLVEDPEVLAVEDPEEAAATAALQEEMKALVASVPDGAGAAFTAMQLQELEQQSRVYQYMAARVPVPTHLVFPVWKSVTGASSEGAQKYPTLLGLATLCLDFGKNPEPEPGRCRRTDGKKWRCWRNTIPNEKYCERHMHRGRKRPVQVVEEAEPDSASGSKSAPSKATEGAKKVDDKSPGSKKLAVAAAAAAAVQST

SEQ ID NO: 71779 - protein, 133 aa, Zea mays
  Clone ID: UC-ZMFLB73412D01_FLI.pep
PPYLSPRTSGNTTLLYLAAKIDSLRKYASSTGTGCLLYTKHTNARRGDDATRSFLLLEDAADGAIAVNMPNCLPHKIRHRKHSQLREAFVFRQQDGVCHNNFLKDASRKPFNRGRAEYSMCTTSIYSFCSLLL

SEQ ID NO: 71780 - protein, 324 aa, Glycine max
  Clone ID: 700650111_FLI.pep
WYRNRISLLPQAEKYVDLRNYYVKAYLGQTPPKAPKYWLAFTVSVPPLGFSTYTVSTAKRTGSTRSSVDIYKSSEKSKFDVGQGNLKLTFSMDQEKCTNYVNIRNLVEEQVELSYLYYSGYNGTNQKDPQNSGAYIFRPNGTHPINHEKKVPLTVLHGPVLDEVHQQINPWIYQITRLYKGKEHVEVEFIVGPIPIEDGIGKEVATRISTTMETNNMFYTDSNGRDFIKRIRDYRTDWDLEVNQPAAGNYYPINLGIYTEDNKTEFSVLVDRAIGGSSLQDGQIELMVHRRLLLDDSRGVDEALNETDCVGDDCRGLTVNFTTE

SEQ ID NO: 71781 - protein, 205 aa, Glycine max
  Clone ID: 700754576_FLI.pep
DASGTMGGACGYGNLYSQGYGTNTAALSTALFNNGLSCGSCYQIKCANDPQWCLRGTIVVTATNFCPPGGWCDPPNHHFDLSQPVFQQIAQYRAGIVPVVYRRVRCMRRGGIRFTINGHSYFNLVLVTNVGGAGDVHSVAIKGSRTRWQPMSRNWGQNWQSNSYLNGQSLSFLVTTSDGRSVLSYNAAPPSWSFGQTYTGRQFRY

SEQ ID NO: 71782 - protein, 263 aa, Zea mays
  Clone ID: UC-ZMFLB73259B09_FLI.pep
LLSNIPSELVGDPIKQERLYDAVDCLLSFVNKDGTLSSAECKRTTSWVEFINPSESFRNIIVDYPYPECTSSLIQALVLFRGKHPIYRRDEIDKIIKSGASFIEKVQRKDGSWYGSWAVCFTYATFFAIKGLVAAGRTYRNSLAIRKACNFLLSKQLGTGGWGENYLGCQIEEYVDSGSPHGVNTAQAMLALLYAGQVEQDPAPLYRAAKELINMQMENGEFPQQEIVGNFNSSLFFNYPNYRNLFPIWALGEFRRRLVAKKG

SEQ ID NO: 71783 - protein, 396 aa, Zea mays
  Clone ID: UC-ZMFLB73116B12_FLI.pep
GHIRYEIIKGICHGLHYLHTDCQIVHLDLKPENILLDDNMEPKITDFGMSRLFGLQQSKIITKTCGGTLGYMAPEYLLKGLISVKADIFSLGVIIIEVMTGGRNYPTCEKSCEQFAVDVVGRWRKRLLEEAGRYTPLEKYVEQVETCILIGLMCVDDDPNKRPTTLDIIERLTKVDVTNTDRGPPKTLEAATGLTGHPNLATRSFLDRFRRTIVIGMLKKALKIQDVSQLEQLLAKEVLLELHKIGTNATGNRSFLERLHASITMATLVQALHSLDLDPSAALRMEVLFLALENMRGKNNSRRRSEDVLELEERPEQIRSVLEAGTRARLSDEEHMPSVSVQAEDQAFPKPKLAKVRATAPVCVSAVWLAAGIGFLCGFTLGEMRGLRRTRVHERT

SEQ ID NO: 71784 - protein, 118 aa, Zea mays; identical to SEQ ID NO: 71259
  Clone ID: LIB3068-006-C5_FLI.pep

SEQ ID NO: 71785 - protein, 55 aa, Zea mays
  Clone ID: 700168932_FLI.pep
MVSYMINQFWMNQKLRKHNYTQLYFGKIMSRNTVITRHMYTSLHSKEEFRDVTKV

SEQ ID NO: 71786 - protein, 102 aa, Zea mays
  Clone ID: 700164083_FLI.pep
YIQTHQSTFQNEKGVLGTTASTPYFPKNLERRTRPSSSLSLPLCLDLDRLFFSFLVLFDLDCDLDFLEPLPSSSLLEDSEDELELDSDELLCFLLVLLLFFA

SEQ ID NO: 71787 - protein, 81 aa, Zea mays
  Clone ID: 700097324_FLI.pep
QSPRATSRNQGCVRKMNGSGDLAEPGIEKSDPVKHVDGWLGKENRRRLPWAHHRPGGRRHGLEPLLTPPANSYRSTNNLGS

SEQ ID NO: 71788 - protein, 90 aa, Zea mays
  Clone ID: 700224348_FLI.pep
AVNNTCHLFLSLLRLCSAPFAHPQHNSCHGKSIRHSGNPRFQRDRHQKAKSPCRANCIWHLTTPLVIRPITTAVTSSRPAWCRRPAATSE

SEQ ID NO: 71789 - protein, 335 aa, Zea mays
  Clone ID: UC-ZMFLMO17168D05_FLI.pep
AKLGAAIGPQSYLSRLAAERSQYASSTARPAAPLAFDELSPPKLQSDIFSAQSSMRPSARSLWAKQPFEQLFGMSSAELSKGDFNLPGRSGGVAKDDFSYKESETKLLQSLRLCIMKLLKLEGSGWLFKQNGGCDEDLIDRVAAAEKLLMQGTAENQLLLHGGDLQQHSSDQAGIQYMRTLPNCGEDCVWRASLVVSFGVWCVRRVLDMSLVESRPELWGKYTYVLNRLQGILDPAFSKPRGALTICTCLQKDTRVRNSPPHSGLTAMGPVPTPLRGAFTTAGVVLEMIKDVEAAVSGRKGRSGTAAGDVAFPKGKENLASVLKRYKRRLASKGQ

SEQ ID NO: 71790 - protein, 614 aa, Zea mays
  Clone ID: UC-ZMFLB73044A05_FLI.pep
PSIVLPQTNIIGDHDKLLDMPELARESSDVTDEMESYSLQLQEPDDKSPLEVKKMSHNALAALVKYLQKKRSGIIERATAEVTEEVVSGAVHHSLKLSEPYKSKKLSKKRAQTHTSSIAREMATVLDTCLLQALILTGQSSGAIELLKGLNYCDLKICEEFLKERREYMVLLELYKSNEMHRDALQLLNQLVEESKSEMENTYFNKKFNSQMILEYLRPLCRSDPMLVLESSLYVLERNPSETIELFLSENVPADLVNSYLKQHAPNLQSTYLELMLSMNDTGINPNLQNELVQLYLSEVLDWYKILKEEGNWTEKTYSPTRKKLISTLESNSGYNTDALLKRLPQDALFEERAILYGKINQHLRALSLYVHKLQMPERAVAYCDRVYEEREQQPSKSNIYFNLLQIHLNPRKAEKEFEQKIIPVASQYSGIQKASATKPKGGRVGKKVVEIEGADDIRFSPSGTDSGRSDGDGDDVNDRGPIMLNEALELLSQRWDRINGAQALRLLPRDTKLQDLVSFLEPLLRNSSEHRRNYLVIKNLILRANLQVKEDLYNRCQAVVKIDGDSTCSLCHKRVANSAFAIYPNGQALVHFVCFKESQQIKAVRGANSVKRR

SEQ ID NO: 71791 - protein, 278 aa, Zea mays subsp. mexicana
  Clone ID: UC-ZMROTEOSINTE009H08_FLI.pep
VALNYLLDKLGGDYSQTVAVLDMGGGSVQMAYAVSANAAASAPAPPHGEDPYVTREYLKGKDYNIYTHSYLHYGAFASRAEILKAKDGPFSSCMLRGFIGQYTYNEEQYDATAAPEGAVYGKCREEIGRALNLNAPCQMKNCTFNGIWNGGGGAGQGSIYVASSFYFVASEVGIVDGNAPSGNTTPGAFGASAEKACQMSVEEAKIEYPNVNDVDVPYLCMDLAYQYTLLVDGFGVERTKEITVVDKVKHGEYYVEAAWPLGSAIEAVSSTKEWREDK

SEQ ID NO: 71792 - protein, 569 aa, Zea mays
  Clone ID: UC-ZMFLB73161D12_FLI.pep
LDLEKKFVPNPNRRGARRREMSEYDERYQGNGDMPAAEGGYPQAEYAAAAAPAAGGSPPADSKPSGFSDHADGRSSQHQHETQSHDSGSSKSRERDRERDKGKDRERDRDRGREKGRDRDRDKDRERSDRDRDRHHRDHRERSEKREHRDRSDDRDRHRDGRDRHRDDRDSERRRDRDRDGHRRHRSRSPSKSRDRDRRSRSRSRSRSKSKRVSGFDQAPPQHALPIVAAGAIPGQLPGITAPIPGVGVLPNLYNLAAGQFNPLVIQPQAMTQQATRHARRVYVGGLPPTANEQTVAIFFNGVMAAIGGNTAGPGDAVLNVYINHDKKFAFVEMRSVEEASNAMALDGIMFEGAPVKVRRPTDYNPSLAAALGPSQPNPNLNLAAVGLTPGSAGGLEGPDRIFVGGLPYYFTEAQVRELLESFGPLRGFDLVKDRETGNSKGYAFCVYQDLNVTDIACAALNGIKMGDKTLTVRRANQGASQPRPEQESILLQAQQQVQMQKLVYQVGGALPTKVVCLTQVVTADELRDDEEYNDIVEDMREEGRKYVPHNAIAECFIVRPYAILAIGL

SEQ ID NO: 71793 - protein, 418 aa, Zea mays
  Clone ID: UC-ZMFLB73178B01_FLI.pep
NVGFSLTRGLLKHFWCTNLLLSVIGFTTSFLGGCVLLMDLKTGLNSPVIADHLPTLALPAAVMTFTTPTSFPSPGLCLNTTKKIPLPGKIEEVRAAGWLDLMKASSPTRKRQIKDVICDAQSDLDLQYCNWTVNYPSALISFEAISDLAGSKRLALFLDYDGTLSPIVDNPENALMSDEMRAAVRHAASLFPTAIISGRSRDKVFDFVKLNELYYAGSHGMDIMGPVRKTTDSNGVECIRSTDVHGKEVNLFQPASEFLPMITEVYEKLGESVKDIDGARMEDNKFCVSVHYRNVAEDDYKKVFHRVTAVLEGYPCLRLTHGRKVFEVRPVIDWNKGKAVEFLLESLGLSESEDVLPIYVGDDRTDEDAFKVLKASNRGFGILVSSIPKESDAFYSLRDPAEVMEFLRMLAAWKEQST

SEQ ID NO: 71794 - protein, 163 aa, Zea mays
  Clone ID: UC-ZMROB73050E11_FLI.pep
QSTTQLILKKPMDTKPWVSTYLTKTLICLMQEHILQHKFWKISHHTQPVRNVVFRRTTNPMYPINEPSTNNKVRIFTTQEQTHNRGRQPISAYTSIHFGPERPRRYLIPIPNPGITVCAWVYMLYRCGYFTGHGDIHLGVVFIKPHHSPLGSIFRAQSCKIEK

SEQ ID NO: 71795 - protein, 276 aa, Zea mays
  Clone ID: UC-ZMFLMO17290H05_FLI.pep
AADDDYPERAFAAVRAFNELPAHERAPHYSRAVDGGVNYSSNVDLYNSPAASWRDTIQILLGPNRHPDLADRIPAACRAEVLEWEVRATAVARALLRLLSQGLGLRPEALEDASCADGKLMVCHYYPHCPEPERTMGIVPHTDPGVLTVLAQDGVGGLQVKHQDEDGKISWVDVKPVPGALVINVGDLLQIMSNDEYTSVEHRVVMNTREEPRVSIGIFFSPGKRGDSVFYGPLPELVSSENPPKYRNFTMSEFYGTFFSRDLASKALLDNFKLSP

SEQ ID NO: 71796 - protein, 624 aa, Zea mays
  Clone ID: UC-ZMFLMO17023D01_FLI.pep
LSASSSLLLLRASPSPSRLRRQARAHRHRGRFDLGFSLSARKVNVGDFVMAAAKSGVDVETRDGGGGSFSEERFVDKLNKLNNTTASIQTLSHWCIFHRKRARRIVDTWEKHFSTATNDKKISFLFLSNDILQNSKRKGGDYVHEFWRVLPRLLKHFYENGGEEAKKLVARLIGIWDDRKVFGTRIESLKDGIFGDNPPIFDHSGNTNNSNPSSNPLNSKVGRKDSSTVLKKLTVGGMPEKIVTAYQSVFDQHFDEDAALNKCKSTVSVLEMLKKDIEDASTKGDPPASTMISDLQEQETILKHCIAQLGSVDAARISLINQLKEALTEQESKSEVLRSQLQVARAEAEHAIQLRQRFGGAVVANGTGSSSSPLLMSSPQIQSLNPAPSLAPPIGAAGDEPKRTAAAMADKLASLSAPVQVLSSIFSSFVATHGASLSSMNSGSPPRDQLSGAPPGFQVEKRPRLERTVLASDMGAPPFSVQAPRLQQPVGAMPTQAAAQMNQAPGPFAPPPPPPPLPPLLPPLLQQFGQSAGGMMGMGPFGMMAGSMPPPPPMSSIMPAGFPAPSGPPPPPLPPAQTQPQQQQQQSPPQPPAPQQSAGFFQPSAGMGYFPAVQVQQSPSAQRQ

SEQ ID NO: 71797 - protein, 676 aa, Zea mays
  Clone ID: UC-ZMFLMO17336G12_FLI.pep
TWSPRRRTPITANQHLRSILQTLLPPLPPPPTRARMAGQPRERGSRSSRKGRSARAGLAQAPPPASDPDLTVGEDAAPWLRATADELEERLLKRLDEAYAAALARLADLGHGEEASLEAVLHSGHCYGKLNDPVSNIVANARAYLSDPGHASAAGGFADLRRLEEYSLAGLVCLLQSSRPTLTRAEALWCLLSSDLRIEEAIAISSSFNGEPSSIAESEEHLPAVAETAQRGYIHYHNTTATAAQDPTLFDPEAFMRLAICQGPAAATISCLKAAGWSRSSGAAPEGQPRESFTKKLSTEELIESVVAELEALDIDKKDPPDANPDPKNQMARELIKQTREMETQLKERKEWAQGKAIQAARKLGADLTELRVLRMEHDENQRRKKEKQVMEDDTMKRLAHLENELKKKSGQLDRSNATVQRLEMENAEIRAEMEAAKLSASETEKQCQGLLRKEKKDSKRLEVWERQKAKLKEDIAECKTNITQAERELAEVNKAIKNMEKKMREDTRVKEENMVLLEDERRKKEAAKADNDRRLEELRRKKEVESECYKDDLHRLQDELSRLQKSAGATQTAVPSANFPGTANRSAAQAAKQQAILRPQPASNRSLPPPAQKPSRRRDCVACKKAAACVILLQCAHQVLCVGCNKLHEDKGITRCPCCSAEVEERIRVFGASSN

SEQ ID NO: 71798 - protein, 227 aa, Zea mays
  Clone ID: 700213637_FLI.pep
LKFCSTSAFDDLSDDFFFQGQLRRSIACRVSGETRARGGQEEPLRGMQIRGAGPRALESAAIPAGVSDLARGSDHRGRGCRCRCRWRGVRRLPSTLAFQPVTAALPRRPWSGWFGLDWTGLWTPSQLPTAAFPPSTPRLPFCSRRLFFPLESRLLLPLLGSRVGWRAAPPRRVRGGRLQHCGSPGLAMRLASRLSLCRCMSGGGGGDGGVWVWVLVRRGTRERWGEW

SEQ ID NO: 71799 - protein, 218 aa, Zea mays
  Clone ID: 700448014_FLI.pep
VLAPILLLVELLEHRVADVEGVARHVAARGDQPEVLDGPDLLDGARRRGGLALQRLVRRGEDGGFRLLAAQDLRPLVETGGGRRDVADEVRPAEPQRQPTAFEVCDLDVEQRREEELGAEHLVVAELPDPAGRAVAEPLGHVAVAPGLHDAHAAVVALDVGPARRGVPLRLGAADAAGHGEVVVQPREHGVLEHLGGEAVPGPVVVHPAQVVQLEGQV

SEQ ID NO: 71800 - protein, 474 aa, Zea mays
  Clone ID: UC-ZMFLB73296E09_FLI.pep
RAREQFTAPSHRALVPPHPPIPSIPSWRWRVVRALLELDLGGVEGRQPGWAVTLPLRAMGSAVAFAKLDGERYPKAAAAVGVKGFPTVLLFVNGTEHAYHGLHTKDAIVTWVRKKTGVPIIRLQSKDSAEEFLKKDMTFVIGLFKNFEGADHEEFVKAATTDNEVQFVETSDTSVAKVLFPGITSEEKFVGLVKSEPEKFEKFDGKFEEKEILRFVELNKFPLITVFTELNSGKVYSSPIELQVFTFAEAYDFEDLESMVEEIARAFKTKIMFIYVDTAEENLAKPFLTLYGLESEKKPTVTAFDTSNGAKYLMEADINANNLREFCLSLLDGTLPPYHKSEPLPQEKGLIEKVVGRTFDSSVLESHQNVFLEVHTPWCVDCEAISKNVEKLAKHFSGSDNLKFARIDASVNEHPKLKVNNYPTLFLYLAEDKSNPIKLSKKSSVKDMAKLIKEKLQIPDVETVAAPDNVKDEL

SEQ ID NO: 71801 - protein, 205 aa, Zea mays
  Clone ID: 700106253_FLI.pep
AQQPWRRPAMSRLLLARLVDDDAARGAPGVVRRPVRVPLLLGAQQRRRRRRGGGPRGAEAQRPEHVEVVPGQQRRLGVVGVVDVRRVEEVVGVEEVDGVVGEERGDVELGVGGGGEGGLVVLVLAEPVVPEPGGGVDELIPLGREFLHLPVRRRDEERRVGVQRRRRHGGHGAHPLLSCWLRSGTPKDRRFLGVAFGWFVAAKSR

SEQ ID NO: 71802 - protein, 486 aa, Zea mays
  Clone ID: 700575289_FLI.pep
SCAYAYTAPIRIVLLASLADPPLPSPRFKMQIFVKTLTGKTITLEVESSDTIDNVKAKIQDKEGIPPDQQRLIFAGKQLEDGRTLADYNIQKESTLHLVLRLRGGMQIFVKTLTGKTITLEVESSDTIDNVKAKIQDKEGIPPDQQRLIFAGKQLEDGRTLADYNIQKESTLHLVLRLRGGMQIFVKTLTGKTITLEVESSDTIDNVKAKIQDKEGIPPDQQRLIFAGKQLEDGRTLADYNIQKESTLHLVLRLRGGMQIFVKTLTGKTITLEVESSDTIDNVKAKIQDKEGIPPDQQRLIFAGKQLEDGRTLADYNIQKESTLHLVLRLRGGMQIFVKTLTGKTITLEVESSDTIDNVKAKIQDKEGIPPDQQRLIFAGKQLEDGRTLADYNIQKESTLHLVLRLRGGMQIFVKTLTGKTITLEVESSDTIDNVKAKIQDKEGIPPDQQRLIFAGKQLEDGRTLADYNIQKESTLHLVLRLRGGY

SEQ ID NO: 71803 - protein, 476 aa, Glycine max
  Clone ID: 700557682_FLI.pep
NFENSMAATYYLLPTSPKTFSPFLRNPPSIPSGHHVSLLGSLLDYPFHCSSRRGNNSVEANCNAKKKNPWLDPFDDGEDPEMEYGSLFADGKQEEDPRPPDDPDNPYGFLKFPSGYSVEIASLALKVRGDVRRCCCVISGGVYENLLFFPAIQLIKDRYPGVQIDVVASERGKQTYELNKNVRWANAYDPDDEFPEPAEYTDMVGVLKNRYYDMVLSTKLAGLGHAAFLFMTTARDRVSYIYPNVNAAGAGLLLSETFVPDSQNLSDGGYNMYHQMVDWLGKPFREVPRQPVPPLRVSISKKLKEVVEAKYEKAGAKKGKYVVIHGIKSDSKASMQSRGDPDSLLPIEVWAEIADVIRDVTPLFVIPHEKERENVEEIFSEDASIVFITTPGQLAALINDSAGVIATNTTAVQLANAREKPCIALFCSEEKGNKFVPRAEEKKCIIISSKTGKLIDIDVEAVKNAVQTFNLSPALV

SEQ ID NO: 71804 - protein, 286 aa, Glycine max
  Clone ID: 700746976_FLI.pep
EGFIPLHWKNKTNIAGGFFLMATNENLPPNVIKQLAKELKNIDESPPEGIKVVVNDDDFSIIYADIEGPAGTPYDNGVFRMKLLLSRDFPHSPPKGFFLTKIFHPNIATNGEICVNTLKKDWNPNLGLRHVLIVVRCLLIEPFPESALNEQAGKLLLENYEEYARHARLYTGIHAKPKSKFKTGAISESTTALNVDQSNTSVLNAEVKTAPSGATLPLQSPLAPSTNNTTRGNKQEQAVVGAEPAVNSSCATSMVHAAAPMKAGGVAKAQADKKKIDARKRSLKRL

SEQ ID NO: 71805 - protein, 237 aa, Glycine max
  Clone ID: 700830314_FLI.pep
IISHQEVKNNDRLTWSLIFNSLLAQISHVYIFFFFRIGHLTAMSDVYSFGVVLLELLTGRRSVDKGRPQREQNLVEWARSALNDSRKLSRIMDPRLEGQYSEVGARKAAALAYQCLSHRPRSRPLMSTVVNVLEPLQDFDDVPIGPFVYTVPAEQQQYNEVAKESETPKERKRENGHHHNRRHHHHRHNGHRHHPLKSPKTPMPSDQSQNDEHRNGRKSGSNSPDTFNASEAQRSMG

SEQ ID NO: 71806 - protein, 337 aa, Glycine max
  Clone ID: JC-GMLE01810041B11_FLI.pep
ITQKTNFHVEDLNLFPIDNGHKNKAHKLNAGYHEWDFSFKLPSNLDQSVEGLPTNWVVYNIKASVDRGYMSKALSASTHIRVIRTLGRDMLESMPMEQINEDIWANKLAYKITVPQKNYIVGTHIKADFVLIPLRKGVEIATIKMELIESRQLFADYAGRRISHQQDVQVAVTEGDMPADSAQRVPDGVENGDELFDESHRFAMTLELPKSLKNCRQSVDTENIRLSHKLRLYVNLKNPEGHTSQLLVKNHVHLFISPNMPPAEDQSVLIDQHMLNQQAVQDEVNQNAPPTYGLHQLDELYNDIDPSGFMTPGGYHSMVGSGANTPFYAQSRSGSAE

SEQ ID NO: 71807 - protein, 284 aa, Glycine max
  Clone ID: UC-GMRONOIR024E09_FLI.pep
QFVQQQNDSNRRITEVNKKRRLKQEGMAETEHAATPDGQIIKYQPMVNEAAKAMLRQIMKWDTSCVESLNKNSDNYVIGDASSSSSGMDSSSSSGWTSGVTLKEVSPASVQSSHVPAATGTQGHVPSTVKPEILSVPQAVASEKVMKDGAHDPPSIPVSQADVMIPDLPPITEMVTGNILDIPEENYMATETDEGYMDSSLGAGGSFPIDFEGISPDADIDDLLANPIWDEILQTSVPEDIDTNVAEASKGNEVQPMENGWGKTQHMDHLTEQMGLLSSDAKRV

SEQ ID NO: 71808 - protein, 285 aa, Zea mays
  Clone ID: UC-ZMFLB73116D07_FLI.pep
HSHSPFPLSGSHSPPTGYPTHHTQTATPHLPRPPVHVLLLPMSPPLDLDYIGLSPAAAAAAAHDDLKGTELRLGLPGSGSPDRRVVAATATTLDLLPAKGAKRGFSDEAPTPSPGAASGKGKKVAEEEDDKKVAATPQPVAKAQVVGWPPIRSYRKNTMSTTQLKGSKEDAEAKQDQGFLYVKVSMDGAPYLRKIDLKTYKNYKDLSTALEKMFSGFSTGKDGLSEYRKDGEYVLTYEDKDGDWMLVGDVPWEMFADSCRRLRIMKGSDAIGLAPRAADKSKNRN

SEQ ID NO: 71809 - protein, 368 aa, Glycine max
  Clone ID: 700832291_FLI.pep
EEKGISGRTNSKPGYSFLRGGNLMDENTTCYITLSELKEATDNFSKKIGKGSFGSVYYGKMRDGKEIAVKSMNESSCHGNQQFVNEVALLSRIHHRNLVPLIGYCEEECQHILVYEYMHNGTLRDHIHESFKKQKLDWLARLRIAEDAAKGLEYLHTGCNPSIIHRDIKTGNILLDINMRAKVSDFGLSRLAEEDLTHISSIARGTVGYLDPEYYASQQLTEKSDVYSFGVVLLELIAGKKPVSSEDYSDEMNIVHWARSLTHKGDAMSIIDPSLEGNAKTESIWRVVEIAMQCVEQHGASRPRMQEIILAIQDAIKIEKGTENKLKSSSSFSGSSSSKPHSSRKTLLTSFLEIESPDVSNGCLPSAR

SEQ ID NO: 71810 - protein, 156 aa, Zea mays
  Clone ID: 700425046_FLI.pep
AKVNQKVDVYSFGVVLLELATGRVANDSSKDAADCCLVEWAWRRYKAGDPLHDVVDETIQDRAVYIDDAVAMFKLGVMCTGDDAPSRPSMKQVLQQLARYDRTASVAGACQDDRGVELGHLPKGKQGRHQVAKRSLDAGSFLGGDEESGNFVAHPV

SEQ ID NO: 71811 - protein, 906 aa, Zea mays
  Clone ID: UC-ZMFLB73210B04_FLI.pep
FERRFASAATRNSYDEILTGLGRPGGGEEFGKYYSLPALSDPRIDRLPYSIRILLESAIRNCDDFQVTGKDVEKILDWERSAPKQVEIPFKPARVLLQDFTGVPAVVDLACMRDAMSKLGSDPNKINPLVPVDLVIDHSVQVDVARSANAAQANMELEFYRNKERFGFLKWGSSAFRNMLVVPPGSGIVHQVNLEYLARVVFNNGGILYPDSVVGTDSHTTMIDGLGVAGWGVGGIEAEAAMLGQPMSMVLPGVVGFKLSGKLRNGVTATDLVLTVTQMLRKHGVVGKFVEFYGQGMSELSLADRATIANMSPEYGATMGFFPVDGKTLDYLKLTGRSDDTVAMVESYLRANKMFVDHSQAEAERVYSSYLELNLEEVEPCLSGPKRPHDRVTLKNMKSDWLSCLDSDVGFKGFAVPKESQGKVAEFLFHGTPAKIKHGDVVIAAITSCTNTSNPNVMLGAALVAKKACELGLEVKPWIKTSLAPGSGVVKQYLDKSGLQKYLDQLGFNIVGYGCTTCIGNSGELDESVSAAITENDIVSAAVLSGNRNFEGRVHPLTRANYLASPPLVVAYALAGTVNIDFEKEPIGISKDGKEVYFRDVWPSTEEIAEVVKSSVLPDMFKSTYESITQGNPMWNELPVSTSTLYPWDPSSTYIHEPPYFKDMTMTPPGPRPVKDAYCLLNFGDSITTDHISPAGNIHPDSAAATYLKERGVERKDFNSYGSRRGNDEIMARGTFANIRLVNKFLKGEVGPKTIHVPSGDKLSVFDAAMKYKNEGHDTIILAGAEYGSGSSRDWAAKGPMLQGVKAVIAKSFERIHRSNLAGMGIIPLCFKAGEDADTLGLTGHERYTVHLPTNVSEIKPGQDVTVTTDNGKSFTCTLRFDTEVELAYYDHGGILPYVIRKIAEQ

SEQ ID NO: 71812 - protein, 168 aa, Zea mays
  Clone ID: UC-ZMFLMO17053C10_FLI.pep
RQRIAIGMARGLAYLHRGAQPAIIHRDIKASNILLDDEFEAKVADFGLAKFAPEGMTHVSTRVAGTLGYVAPEYALYGQLTEKSDVYSFGVVLLELLSGKKAFISLSEGQSFVLTDWAWSLVRRGRTVEVIQEGMVDPGPTKVMEKYVLVGALCTHPQLHAGRQWSRR

SEQ ID NO: 71813 - protein, 440 aa, Glycine max; identical to SEQ ID NO: 45590
  Clone ID: 700855340_FLI.pep

SEQ ID NO: 71814 - protein, 513 aa, Glycine max
  Clone ID: 700832290_FLI.pep
KGNVQKNIGCLTLCTALLSLITIFIIPFCESFNYGQALSQSLLYFESQRSGRLPYNQRVTWRHHSALTDGLEQGVDLVGGYYDAGDNVKFGLPMAFTITLLSWGAIEYGEQIAAAGEYAHALEAIKWGTDYFIKAHTQPNVLWVEVGDGDTDHYCWQRPEDMTTSRQAYKVDSNNPGSDVAGETAAALAAASILFRRTNPHYSQLLLHHAQQLFEFGDKYKGKYDESVGVVKGYYASVSGYMDELLWAAVWLYRATQKEEYLTYFLDKAYDFGGTTWAMTEFSWDVKYVGVQAIASMFLMEEKKHKKHQVILKQYRSKAEHYLCACLNLNNITNVERTPGGLLYIRQWNNMQYVATASFLLTVYSDHLLATDQKLHCQKGEVGPHEMLAFAKSQVDYILGTNPMAMSYLVGYGPKFPQKVHHRGASIESYGENKGFIGCTQGYDNWYGRVEPNPNVLIGALVGGPDIKDQFKDERRNYIQTEACTYNTAALVGVFARLHQSHAHAETPLVASS

SEQ ID NO: 71815 - protein, 887 aa, Glycine max
  Clone ID: 700830313_FLI.pep
EKPGGAGEFGKYFSLPALNDRRIDRLPYSVRILLESAIRNCDEFQVKSNDVEKIIDWENTSPKLVEIPFKPARVLLQDFTGVPAVVDLACMRDAMNKLGGDSNKINPLVPVDLVIDHSVQVDVARSENAVQANMELEFQRNKERFGFLKWGSNAFNNMLVVPPGSGIVHQVNLEYLGRVVFNTNGVLYPDSVVGTDSHTTMIDGLGVAGWGVGGIEAEAAMLGQPMSMVLPGVVGFKLLGKLRDGVTATDLVLTVTQMLRKHGVVGKFVEFYGEGMSELSLADRATIANMSPEYGATMGFFPVDHVTLQYLRLTGRSDETVSMIESYLRANKMFVDYSEPQVERVYSSYLELNLEDVEPCVSGPKRPHDRVPLREMKVDWHACLNNKVGFKGFAVPKESQNKVAEFTFQGTPAHLRHGDVVIAAITSCTNTSNPSVMLGAALVAKKACELGLQVKPWIKTSLAPGSGVVTKYLQRSGLQKYLNELGFNIVGYGCTTCIGNSGDINEAVASAITENDIVAAAVLSGNRNFEGRVHPLTRANYLASPPLVVAYALAGTVDIDFDTEPIGIGKDGTKIFFRDIWPSSEEIANVVQSSVLPAMFRDTYNAITQGNPMWNNLSVPTGTLYAWDPTSTYIHEPPYFRDMSMSPPGSHGVKDAYCLLNFGDSITTDHISPAGSIHKDSPAARYLIERGVDRRDFNSYGSRRGNDEVMARGTFANIRIVNKFLNGEVGPKTIHIPSGEKLSVFDAAEKYKSEGHDMIILAGAEYGSGSSRDWAAKGPMLLGVKAVIAKSFERIHRSNLVGMGIIPLCFKPGDDADSLGLTGHERYTIDLPSNVNEIRPGQDVTVVTDAGKSFVSTLRFDTEVELAYFNHGGILQYVIRNMVNAKH

SEQ ID NO: 71816 - protein, 122 aa, Glycine max
  Clone ID: UC-GMROPIC018D09_FLI.pep
RWSAIAASLPGRTDNEIKNFWHTHLKKRIQKSGVHNGNPSSRILQEAQANTSSNASSVMIANYGLPSRNINPPIAGFYGAVSSDTFGEIKDNHGSCQLSEEMEFWYNIYSSNQGKHHETMEI

SEQ ID NO: 71817 - protein, 581 aa, Glycine max
  Clone ID: UC-GMROPIC024C04_FLI.pep
ASLRFPPLLCKHRILGSCVKDMAEVVKSEECCQENKQSTAASCSSVSEGSGSAIHKSPGRCSPASTSPSHRRTTGPIRRAKGGWTAQEDETLRNAVAVFKGKSWKKIAEFFPDRSEVQCLHRWQKVLNPELVKGPWTQEEDDKIVELVSKYGPTKWSLIAKSLPGRIGKQCRERWHNHLNPDIKKDAWTLEEELALMNAHRIHGNKWAEIAKVLHGRTDNAIKNHWNSSLKKKLDFYLATGRLPPIPKNSPQVPVKDTIRRSASKSMLGCSNKELNAAVETSSETTAISKLDDSGRNQFESSGTVREVGDSSSVPANDSADSDCVECKPGSSNINPSCSNSEHVSRANFGTTFGPISENSGLNGNSTFEHCTNNGDRSSTRLIGTSSQENPTCGSLCYEPPQLDGSVPIDSLYLNYTCQQNEYCPSPTMSPTGFFTPPRAKGSELCTETPESILRKAANTFPNTPSILRRRRTGAQTLTSPTKVLKVDNNPHTSNKTERTNDDSGSGHFSGSPASHGYGIGIPNNKAFNASPPYRLRSKRTAIVKSVEKQLEFAFDKEKNDDKRSNVMTEDRLHEKKLVVT

SEQ ID NO: 71818 - protein, 329 aa, Glycine max
  Clone ID: UC-GMROPIC090F10_FLI.pep
MHSGILNASAAVLATYQSLITSFPHLGITLIINHAIRKATIQNVMSASTSAHPFWIQKYCPTHEHDGTTRCCSCERMESQEAGYIALKDGRKLCLECLDSAIMDTNECQPLHADIQRFYESLNMKLDQQIPLLLVERQALNEAREGEKNGHYHMPETRGLCLSEELSTFSRRPRLGTTMDMRAQPYRPTTRCDVTAILILYGLPRLLTGSILAHEMMHAWLRLKGYRTLSQDVEEGICQVLSHMWLESELSSASGSNFVSASSSSASHTSRKGKRPQFERKLGEFFKHQIESDISPVYGGGFRAGQKAVSKYGLQRTLHHIRMTGTFPY

SEQ ID NO: 71819 - protein, 230 aa, Zea mays
  Clone ID: UC-ZMFLB73197H07_FLI.pep
ARARVGDGVAVQGRRQRGRRHDRERAAIQPEPAHAAGERRGHAAAAQAPPRGLPLRALQRGHEARPRLREELRTLPAGHEHGLQRRTLPARHHVGRLPLPRHVASSQDHGCWEGLCRPMPRRRICGHPAYHPTRIAPPVTAKSARPPTARPAEWPGFCGPKASKTKGETHRSNPREKKARTRGRCGSHYLEDRNSVYKLFARPFSSTHQTLFLGYLQRRSGEGTRKTSSF

SEQ ID NO: 71820 - protein, 442 aa, Zea mays
  Clone ID: UC-ZMFLB73193G03_FLI.pep
FISVLLTIGSETAEKELRRQSAIKRSIDLFFEYPYNNFLHHHVENIIVACLEGKRPEVVEHVLHECDIVGKILVSERFSSLSTESNGPTVPSEGKTPPRIGNVGHMTRIANKLIQLGNSNNTIQAHLQENNDWVEWQTNVLVKRNEVENVYHWACGRPTSLHDRGRDSDDDDFRDRDYDVAALANNLSQAFRYGIYSNDDIEEAQGSLERDDEDVYFDDESAEVVISSLRLGDDQDSSLFTNSNWFTFDGERGIDDRLSASVPSSSPNSLETSLEAEEADDGKVIGTEDEMETVYLGNGSAEEVKDVAECNEQPNCCTEDERLKNTEGIERHPDVSNHYTDICTNEAASAAAESSAPSVEIVAKKTVDEPSEAERTVDEPAESSLDSSVSIPLPAPVNGSEPANSEASSEQVAHDTDVQQPVKEAPDEDVNAKKTDVAKASE

SEQ ID NO: 71821 - protein, 325 aa, Zea mays
  Clone ID: UC-ZMFLB73222C08_FLI.pep
RAAPAARAFGNVDVVGRPTAGTPMGSSGLAATLRAAAAMLRLDAEWDWFITLSAADYPLLTQDDLIHVFSSVPRHLNFIDHTSDIGWKESQRVQPVIVDAGIYLAGRNQFFQATEKRDTPDGFKFFTGICLNLHFVFHPVDEKWFLNTCTPFLLGSPWVILNRHFVEYCVFGWENLPRTLLMYFTNVMLPLEGYFHSVACNSDFHNFTVNNDLRYVVWDDPPQMEPHFLNVTHYDELVGTGVPFARKFKEDEPLLDMIDDKVLRRWRHRPVPGAWCTGKRRWFSDPCSQWSNVNIVRPGPQAEKFRTYINQIMEESKSSNNSCKQ

SEQ ID NO: 71822 - protein, 399 aa, Zea mays
  Clone ID: UC-ZMFLB73239B07_FLI.pep
WRRIRSHCRCHSRRRRSGTPRSPRCSWAGWRGRPTRTPSASTSSATATSSRPSSSPTSSPAAPRATASSVPLFLSRSRPLAPPVCCCCCFFFFIWTSEVDPYAKRRQPSLLACTAGDVQGGGRGQEGVRGRHPRHQRPPRQLQPRRPRRQAAPPATHPPPFAAGHPGAARARAPLATPAHASHRRGVQGRVAGAVVLPPLHDAAATGRAPLRPRRAPAVPRRAPVLPRRRRHLRVRTRTPLPAPNSNPPPATRYVSLAQLKKKPARHGVRAPRAPPNYLHCTSREATRISCPLLVGFGLAGSLRACGGRGGGPVTSPVGARTHAWQSGCFGLELEQPSTRGGTGGRHWRRHSRAQAGPGPDRAASSCSHVPTCRPARRHKKKRERRWTFQCYVLDMAMC

SEQ ID NO: 71823 - protein, 293 aa, Zea mays
  Clone ID: UC-ZMFLMO17023E06_FLI.pep
DSLDLFDRMTRVEGLVPNAITFVAVLSACNHGGLVDEGRRYFAAMVSEHGIRPRIEHYGCMVDILARAGFIEEALDVVAGMNCRPDSIIWRSLLDACCKRNAGLELSEAMAKLALDVPDDAVSGVYVLLSRVYASAQRWNDVGMIRQLMSQEGFKKEPGFSSIEMDGSVHQFVAGDTSHPQSEEIYVKLDEIQQRLTSAGYKPDLSEAPMVADIDRTKGATLRLHSERLAISFGLLNATPGAPIRILKNLRVCKDCHTISKLISKLYNVEIIVRDRIRFHHFKDGSCSCKDYW

SEQ ID NO: 71824 - protein, 82 aa, Zea mays
  Clone ID: UC-ZMFLMO17059B11_FLI.pep
NISKHRTFLSGGGSGSLGSGRKLGPPLGQALAVSLFLQPLSKKLLVLGSLRLLGDPLLLANDSSALPLKGQGVTSHWISVCF

SEQ ID NO: 71825 - protein, 346 aa, Zea mays
  Clone ID: UC-ZMFLB73112F11_FLI.pep
HVLKYDRDLILHNALLDMYCKCGSLEDADALFHRMPQRDVISWSTMVSGLAQNGKSVEALRVFDLMKSQGVAPNHVTMVGVLFACSHAGLVEDGWHYFRSMKRLFGIQPEREHHNCMVDLLGRAGKLDEAVEFIHGMSLEPDSVIWRTLLGACRMHKNASLAAYAAREILKLEPDDQGARVLLSNTYADLRQWTDAEKPWKAMRDRGMRKEPGRSWIELEKRVHVFIAGDLSHPCSDTIIQELNRLIGRIKSLGYVPQTEFVLQDLPTEQKEDLLKYHSEKMAIVFGTMHAVDGKPIRIMKNLRICGDCHAFAKLVSKSEGRVIVIRDPVRFHHFQDGACSCGDYW

SEQ ID NO: 71826 - protein, 383 aa, Zea mays
  Clone ID: UC-ZMFLMO17156B10_FLI.pep
ATPTRTPPRSSSPAPRTEAVVPPDWDSAVSTVSSHPTPPVVVVCGPKNSGKSTFSRVLLNALLPRHGKVAYLDTDVGQPEFGPPGCLSFHVLDEAIVDLMNPSLREAERCYFFGDISSKRDPEAYLNCLFHSYDYFVGKYRCDENEMLPLIVNTPGWVKGAGFDMLVEMLRYICPTIVVQIRITIKNKNLPDGGFWLDGGQTGPMMINIDAAFHDASNRSLLIQKDSCGMRERRLVEYLKQCFPSNISLSTNKELAYALASLPPYQVPFSDVAIVHLHCKVPAGEIWHSLNATIVGLAVSNASEGTRSIPYCVGLGIIRGVDIQKGLLYLITPVPLQRLQSVDLLQQGLIEIPTALLQVRGCVSPYMSTNVLHKISERDLYAG

SEQ ID NO: 71827 - protein, 411 aa, Zea mays subsp. mexicana
  Clone ID: UC-ZMROTEOSINTE119E07_FLI.pep
VGAMTPCMRLYAYLGKELMVFLKQDENHPYKKWINTYASSDFEDTTLQIEELLDKLSVSLTGEELEIIGKLYQQAMKLEVEFFSSQLIDQPVVAPLSRYCDPKYKLLIFSDFDLTCTIVDSSAILAEIAILSFQKANQSGIDNNLDRAKSGDLRSSWNMLSKQYMEEYEKCMERLLPPEESKSLDYDKLYKGLEVLAEFEKLANSRVVDSGVLRGMNLEDIRKAGERLILQGGCKNFFQKIVKTRENLNLDVHILSYCWCAELIRSAFSSAGCLDGLNIHSNEFAFEDSVSTGEIDRKMQSPLDKVEKFKSIRSDVDSTVPFLSVYIGDSVGDLLCLLEADIGIVIGSTTSLRRVGKQFGVSFVPLFPGLVEKQRQLAEEDASVFKARSGVLYTVSSWSEIHAFVLGSDFS

SEQ ID NO: 71828 - protein, 138 aa, Zea mays
  Clone ID: LIB3354-045-E7_FLI.pep
KSRKGQATSTAQHSTSTPSVLGRRGEGNPGPGRVVGRGSAAEEMEEREKLVCLAKLAEQAERYDDMVEFMKNLARMDVDMSAEERHLFSVGFKNTIGAKRASWRIICSHEQKVAADRQTGVMIDAYKKKVEEELRKER

SEQ ID NO: 71829 - protein, 567 aa, Zea mays
  Clone ID: 700082825_FLI.pep
CSELKMSEVNNTQLDLEKGFSQVSHDNDSSSPVTVHKMKVETEGGSEIESPTPEKRESRSKGVVVSSLARNLLAERYKDRLANQLVEDESETDDEDYNESVSPSGSRSLFLESIELLEKHKDLLNLFNRMESSIRLLHLRKKMATFNNIATQVEILTKRKLLYSHLAQMKHLFPEAIQIKRILVHDEKSICMYADMEITLVMDVVECTSPDHSLSMTICEAFYSKLLRFLDAHHKGADIPEAILPEPFNSRPREKLYLEAVHNGHAAEPPLHGAVEEGFSNASHFPQSFQKFMSKKIIADGTEKTQLLSDPAELSSVSAYGTKGSNRNPKKQDEHAPVPVNSEISATPSRHLISCCQESTPKQQTSESPLLSGTPAMQTPKRPLLAPLEKPKATCGHISEPRSASSARRSLNTSLTYEGGSPSYYDGMEHTATAKKCMISEDLSSFNKSFEEDSHVFFTDKDKINEVESVDSQERIASLRTTFDIVYDISHSTKNPLITKQELFHNILANNLEIEEIGEIEEQLHILEDLAPDLISKKVINGGEILYSIEPITDKNSVRARLVVEPV

SEQ ID NO: 71830 - protein, 175 aa, Zea mays
  Clone ID: LIB3245-327-G9_FLI.pep
MGSLLTRTGVLPWLQAKIVDPVLQVIRRGAEPKQLAFSAALGVTIGIFPICGTTVILGAVAVAMLGSRCNAVTLMVLNLAATPIELSLIVPFLRLGEAVTGSGHFPLTADALKNVLTGHASKDVLMSIVHAMLGWLIAAPIVLVVLYAVSFPCFKILVNRFGGIPSSPRTPIKAV

SEQ ID NO: 71831 - protein, 154 aa, Zea mays
  Clone ID: 700102161_FLI.pep
PTSRPSQESRKLIEHLVAEESRARAGPEAKVWRSGRHERHPAGSVGCVGALVRGRVARGEEIVERSGVPGFGQRQPRLGVAEEQVEPETGLCLHPGAVRRHLQASPGQHPQASPRQHPQLDRCLEKQGGQRLAASFRLFTANKKKGLERLDTLC

SEQ ID NO: 71832 - protein, 402 aa, Zea mays subsp. mexicana
  Clone ID: UC-ZMFLTEOSINTE106G02_FLI.pep
SLSGHTAPTDDDNSRQQLGQPATAAHSRLTTNRLVHLLDLGARAAAASGGVLVHAASAAHVFTRALVHLGDDGVAEALQLLHLVLELVRLGELVGVQPADGRVDGVLDLLLVIGRQLGRDLLVLDRVAHVVGVVLQRVLGLHLLLVLLILRLVLLSVLHHLLDLLLGETALVVGDCDLVLLPRRLVLGRHVQDAVGVDVKAHGDLWHTTGCRGDAGELELAQQVVVACPGPLTLVDLDQDTGLVVRVGGEYLLLLGGDGGVPRDQHRHNSSSSLQTQRKRGDVQQKQVLSSWQPYHCSVAPPLHLHPQPPPLLHHLRPHPLLPHPPPRHLPPRHYLVHHAPPQQHPRHQHPHQSPPPNPPPQSHRRRRHLPPRPHPPRHGLRQQPRHETRLRHGCARHHRSG

SEQ ID NO: 71833 - protein, 420 aa, Zea mays
  Clone ID: LIB3150-028-C1_FLI.pep
IRLQCGWRKGTGQITPSSRPVVTRRVAVAAPAPTGTVMESWVRAVVEAIHSSRSQTVIYLAGGASQALGWLLSVPGASGTVLEVVVPYSRASMAQLLGKMPLQFTSKQAAEDMALAAYNRALKLSGPGLQVMGVGFTGSLASSRPKHGDHRFYVSTWTHNCLRTSHVTLSKGLRSREEEDKVSSYFLLKAIADTCRVSATIQSDIHKSEIPEEIMEQFDEDQELQQVINGQVCMKVYNFAAPAESNLNRKIILPGSFNPLHDGHLRLLEAAVSMCDDGLPFFEISAINADKPPLSIAEIKRRVEQFRKAGKNVIISNQPYFYKKAELFPGSAFIIGADTAARLVNPKYYGGDYNRMLEILLECKSIGTTFLVGGRKIEGDFKVLENLDIPEELREMFISIPEEKFRIDISSTEIRKSQGL

SEQ ID NO: 71834 - protein, 177 aa, Zea mays
  Clone ID: LIB3066-030-H11_FLI.pep
SAMVKGSADYVAINHYTTYYASNFVNATETNYRNDWNAKISYERDGVPIGKRAYSDWLYVVPWGLYKALIWTKEKFNSPVMLIGENGIDQPGNETLPFALYDKFRIDYFEKYLYELQCAIRDGANVFGYFAWSLLDNFEWRLGFTSKFGIVYVDRNTFVRYPKDSARWFRKVIKNEN

SEQ ID NO: 71835 - protein, 353 aa, Zea mays
  Clone ID: LIB3607-048-D10_FLI.pep
GKQRRDNKAILRSWRVLGMADASSRTDTSTVLDMDDKNQRLENGQSGAMALASNSSDRSDRSDKPMDQKVLRRLAQNREAARKSRLRKKAYVQQLESSKLKLASLEQELQKARQQGIFISSSGDQTHAMSGNGAMTFDLEYSRWQEEENKQINELRTAVNAHASESDLRLIVDGIMAHYDEIFRLKGIAAKADVFHILSGMWKTPAERCFLWLGGFRSSELLKLLVNQLEPLTEQQLMGLSNLQQSSQQAEDALSQGMEALQQSLAETLAGSLGPSGSSGNVANYMGQMAMAMGKLGTLENFLRQADNLRQQTLHQMQRILTIRQAARALLAIHDYFSRLRALSSLWLARPRE

SEQ ID NO: 71836 - protein, 85 aa, Zea mays
  Clone ID: UC-ZMFLMO17169B08_FLI.pep
PKPNPRTSGSSCDIHILLIICTFHIYFQSKYMIYRMLFPRQTTTYSKLFETHKLARMQYANEEYFVHNPLPTLARGDRFLFHSGS

SEQ ID NO: 71837 - protein, 431 aa, Zea mays
  Clone ID: UC-ZMFLMO17169F10_FLI.pep
GEAMGLTPGSVVATEYLKHSGLQDYLNQQGFHVAAHGCATCVGNSGDLDGSVSAAITENDIVAAAVLSANRNFEGRVNPLTRANYLASPPLVVAYALAGTVDIGFEEEPIGVGKGGKEIFLRDIWPSNQEIDEVVESSVQTHLFKKVYDSIMERNPRWNQLPVPKEALYPWDDRSTYIRKPTYLEGMSMTPPGPPTVTEAYCLLNLGDSITTDHISYSGKIPEGTPAAKYLLEYGVEPKNFSSYGGRRGNNEVVMRGAFANMRIVNKLLNGEAGPWTIHVPTGEKLYVYDAAMKYKSEGHDMVIIAGSEYGSGSSRDSAAKGPMLLGVKSVIAKSFERIHRSNLVGMGIIPLCFQAGEDADSLGLTGRERYTIHLPTSTAEISPGQDVTVTTHDGRSFTCTLRLDTQLEVTYFNHGGILPYMVRNLAAQMK

SEQ ID NO: 71838 - protein, 638 aa, Zea mays
  Clone ID: LIB3245-495-B7_FLI.pep
LSNTCLLLSSSYHQLRLVHSNSFPTARNCTSETTNCHMEAQNVEVAALVKKIADLHADITKLPSLSPSPDVNALFTSLVMACVPPSTVDVTKLSPDSQRMQEELIRLCSDAEGHLEAHYADMLAAFDNPLDHLGRFPYFSNYINLSKLEYDLLVRYIPGLAPSRVAFVGSGPLPFSSLVLAARHLPNTTFDNYDRCAAANDRARKLVRADKDLNARMSFHTVDVANLTDDLGKYDVVFLAALVGMAAEDKAKVVAHLGRHMADGAALVVRSAHGARGFLYPIVDPEDIRRGGFDVLTVYHPNDEVINSVIIARKIDAHANTEVSALVQKITGLHAAINKLPSLSPSPDVDALFTELVMACVPPSPVDVTKLGTDAQRMREELIRLCSDAEGHLEAHYADMLAAFDNPLDHLGRFPYFNNYVNLSKLEYDLLVRYVPGIAPSRIAFVGSGPLPFSSLVLASRHLPNVMLDNYDRCAAANDRARKLVRADEGLRKRMFFHTVDVANLTDELRKYDVVFLAALVGMAAEDKAKVVAHLGRHMADGAALVVRSAHGARGFLYPIVDPEDIRRGGFDVLAVYHPDDEVINSVIVARKINAHVKGLQDGHAHARGAVPIVSPPCKCCKMEANTLHQKREEMATA

SEQ ID NO: 71839 - protein, 314 aa, Zea mays
  Clone ID: UC-ZMFLB73165F09_FLI.pep
CLASEAMQPPHQPPMNGQHSQPPPQGPVVPMPPQQQAPPLPYYQQQQAPQYYQQALPQPWGQQQQYAAPPPQYPPPPQTQHYATPPQQYAPLPQQQYAPPPQQQYAPSPYGTTPGSGEVRTLWIGDLQHWMDENYLHYNAFAAVAQQIASVKIIRNKQTGHSEGYGFIEFYSRAAAEHTLMNFNGQMMPNVEMTFKLNWASASTGDKRGDSGSDRTIFVGDLAHDVTDSMLEDVFRAKYPSVRGANVVVDRMTGWPKGFGFVRFGDLNEQARAMTEMNGMLLSTRQMRIGAAANKKNRDAQQTYATDGCHAICI

SEQ ID NO: 71840 - protein, 361 aa, Zea mays
  Clone ID: UC-ZMFLMO17159A05_FLI.pep
VSEIRTAIQALDVETVILDDELSPGQLRNLEKSFGGSVRVCDRTALILDIFNQRAATHEASLQVTLAQMEYQLPRLTKMWSHLERQAGGQVKGMGEKQIEVDKRILRTQISALRKELESVRKHRKLYRNRRQSVPIPVVSLVGYTNAGKSTLLNRLTGADVLAEDKLFATLDPTTRRVLMKNGTEFLLTDTVGFIQKLPTMLVAAFRATLEEISESSVIVHLVDISHPLAQQQIDAVERVLKELDVESIPKLVVWNKIDNTDEPLSVKEEAQKQGIICISAMNGDGLEDLSNAVQAKLKDSMVPIEAFVPYDKGDLLNDIHKVGMVEKMEYKESGTFVKAHVPLPLARLLTPLRQQVAATV

SEQ ID NO: 71841 - protein, 350 aa, Zea mays
  Clone ID: UC-ZMFLMO17169H12_FLI.pep
FLSSSRYLSEKATSLATGVISELVKELRVKPVPTVLASFSGGSKGCMYKVIQLLAGICEGDATMKDYRLVRNCICGQIYDSSPVDFVSDVGTQFLQKPAVGNSSQSTILRSWMAKLLASGMDTLFPSRIEAQRAEYWHTLYSAAGLGPVLIFCSEDDNLAPCHIICGFARRLIELGTDVKLMKWSDSQHVGHYNSHEIEYRKAVDDTLKKALVTFCHRSQLYDSNMAGDQEYKIAHSVCSLHNAAANSNESLRRVANSPSDHFFLPSSKDHDESREPSSLIEDQRRHISHPPCMEPKGVLGQILFDVCVPNNVEGWDIKPTVSPNGRPTFASARQLGPFNPIRYFRRSRL

SEQ ID NO: 71842 - protein, 103 aa, Zea mays
  Clone ID: UC-ZMFLMO17113B10_FLI.pep
GKSMLLWKIFKRISGSWRSMISGRKNWHVPFMLNSKIGYMPQGISASYTVCKANEHKMGFLCKREMQQYASASAIQFRAPPKSESDFQAELVSPALMHLVFQL

SEQ ID NO: 71843 - protein, 225 aa, Zea mays subsp. mexicana
  Clone ID: UC-ZMROTEOSINTE044E02_FLI.pep
SPSPQTQASDLSHLRRRFVRVEGRREEMAATEGVLLGMGNPLLDISAVVDDAFLTKYDIKLNNAILAEEKHLPMYDELASKSNVEYIAGGATQNSIRVAQWMLQTPGATSYMGCIGKDKFGEEMKKNAQAAGVTAHYYEDETAPTGTCAVCVVGGERSLIANLSAANCYKSEHLKRPENWALVEKAKYIYIAGFFLTVSPDSIQLVAEHAAANNKVNSYYNESTL

SEQ ID NO: 71844 - protein, 302 aa, Zea mays
  Clone ID: UC-ZMFLMO17018G07_FLI.pep
LPPTVRPASPPARGLAQLLRPLLRRRSWCGRAPQRLCVCWWPGACNREPVSSLPAQPGANRPAAGSGSGQWPTADNHTSFLRRPPPLPPTMHPVPVSSQPFTATPAKKLVSRSTAVRKAIHFVNLRTAGRSSGNLAMNSVPKPALGSETSGREDFAVGDKDAVVIVDHGSKRQESNLMLNDFVEMFRAKTSYRIVEPAHMELAEPTIKDAFGKCVQQGASRVIVSPYFLSPGRHWKQDIPALAAEASKEHSNIPYIVTAPLGLHELMVDIMNDRIKYCLRHVAGDVDECTVCAGTGKCRLYS

SEQ ID NO: 71845 - protein, 479 aa, Zea mays
  Clone ID: UC-ZMFLMO17169A07_FLI.pep
GCVLCACADGGRRTAKEMDRLPESTRSMRKYASEAGGLRAARQGPHGRSLTARTAHSMSTTALRTKSKSAASLLRRVPFAPLRPVLANLQEVFLGTKLAVLFPAVPLAIAAQCAHFGQVWVFTLSLLGLIPLAERVSFLTEQIAIYTGPTVGGLLNATCGNATELIIALFALMGGQIEVVKCSLLGSVLSNLLLVLGTSLFCGGVVNLGSDQPYDRTQADVSTGLLILGVLCQSLPLMLRYAVGAGEHSVAAATTVLDLSRACSVVMLLAYVAYLFFQLKTHAQLFEPQEVDDGCEAEEDEQAVIGFASGFFWLAFNTVLIAILSEYVVGTIEPTSKSWGLSVSFISIILLPIVGNAAEHAGAIIFALKNKLDITLGVALGSATQISMFVVPLSVIVAWIAGIQMDLDFKLIETGSLFVSVIVTAFTLQDGSSHYLKGILLLLCYIVIGACFFVTRQPASNNNGAGLSLPTGTLSAQAA

SEQ ID NO: 71846 - protein, 231 aa, Zea mays
  Clone ID: UC-ZMROB73075F06_FLI.pep
FASLLGLIVWNRQTGNVYKNAKRKIERGIAFPTCVSVNNTVCHFSPLTTDDAVLEENDMVKIDMGCHIDGFIAVVAHTHVIANGPVTGRAADVLAAANTAAEVAMRLVRPGKKNKDVTEAIQKVAAVYDCKIVEGVLSHQLKQFVIDGNKVVLSVSNADTKVDDAEFEENEVYAIDIVTSTGEGKPKLLDEKQTTIYKRAVDKNYNLKMKASRFIFSEISQKFPIMPFTAR

SEQ ID NO: 71847 - protein, 442 aa, Zea mays
  Clone ID: LIB4765-006-F1_FLI.pep
HGFVTHAALLIVIGTCILIVSKSRLPLAGFHGQQVLERWAAVAVATEEHAGDDLVHGLRHVDAVPVDVLGGARAGRGDLRRAAGGEEVEVVGAAAGAAAGAEGLGEAVARGAPHHGEVRGVVVGVREDGGRVAAAQRAEGRQEAAVVRVALAVDGGGAAHGVAVVGARQRHGQRQAPRQRQPLHDHVLGASLQQALDEGGDPLDGHGADELGRDGVAGDDCVGVVVGADLAHPEERVGGGGGGGGGGGPEQVRVEPAQLRHDGLRRDVDAEVVPREEVVLDGRGAGHREVDAGSGRRGVGVGDGHGEVGREVGRQRQRLGQEVDNQAAVGVAVGGAVEEGGAVGRAGHVAERVGPRRRPRVPRVRERVAERVHRPERRRRGSSIASRCMRRGRGHGEDDGGGGHEEEEEEAEVEAVVCGARHAYHSVRRATGVVSCPYILAS

SEQ ID NO: 71848 - protein, 103 aa, Zea mays
  Clone ID: 700356188_FLI.pep
EAEDAAVVGGVWARRQHLALAALWLLMSCTLAVCMQGAVQGCGRRILRCRLPCYVVCNALIYCILRRFFPSSSICFFLYVAAAHKRLNNTIAATYIDGVGFVN

SEQ ID NO: 71849 - protein, 85 aa, Glycine max
  Clone ID: 700560587_FLI.pep
VGPVLSLTCPHDNQVISSIKFASYGTPLGTCGNFYHGRCSSNKALSIVQKACIGSSSCSVGVSSETFGNPCRGVAKSLAVEATCA

SEQ ID NO: 71850 - protein, 66 aa, Glycine max
  Clone ID: 700562627_FLI.pep
KVLHKLHWIILYEKNTIYPISQSHPWLFHYVTLFPMPKLVWHHPCLLGFDATNHKTNERWERKRLT

SEQ ID NO: 71851 - protein, 404 aa, Zea mays
  Clone ID: UC-ZMFLMO17092C10_FLI.pep
QTRPQFHHFPPPQVGGLPILENLMPMGHLDQFLADPGFAERAARLSGFDGRPGGSGYGGVGVPGQFGIPDAGPIGALKELELGNGRDESSVSDPASGSAEMALNKGPSDGNAKKRKASGKGKGKDGPGSAAAGAAKEESSGKRCRSADESSGAEDNNPTTKGKAAQSSSENGGGRKQQGKESATKPPAEAPKDYIHVRARRGEATDSHSLAERVRREKISQRMKLLQDLVPGCNKGKCFSFQVVGKAVMLDEIINYVQSLQRQVEFLSMKLATVNPQLDFNSLPNLLLPKDIHQPCGPPHFPLETSGAPLPYLSQPHHGSPLGCCMDTQGGSMHPLDAAFCRPMNPQHPFLNGASDAASQVGTFWQDDLQSVVHMDIGQSQEIAPTSSNSYNGSLQTVHMKMEL

SEQ ID NO: 71852 - protein, 111 aa, Zea mays
  Clone ID: UC-ZMFLMO17122B03_FLI.pep
MIFSLARPDVLPSADLGVRKGVQMLYALEDVPRPSQMDKLCERWRPYRSVGAWYMWRLIESKVPQPAPAIPVGSLAFPSPDGQSMLQQQEQQQQQTVIQMIDPLQMLPGMG

SEQ ID NO: 71853 - protein, 95 aa, Glycine max
  Clone ID: 700854493_FLI.pep
EAKADGFLPGGASLHNCMTPHGPDTKSYEATIARGNDGGPCKITDTMAFMFESSLIPRISQWALESPFLDQDYYQCWIGLKSHFTVTETSPENTN

SEQ ID NO: 71854 - protein, 167 aa, Zea mays
  Clone ID: UC-ZMFLB73196B05_FLI.pep
RIDGVAGQRFGITRARTVRANGELIEKDAVLLLRRNQTVRVVGSEALPKSGRISRYDVKIKHKAGEEQEETGKAQDKVEKIQVNASGIQESSKEILGKTDKLLDALEPNLDKEEKVQEKEEQHLDEVDNVQENEGKVQCPAEKIQEGGEVQCPRQRKSRKVEDSETK

SEQ ID NO: 71855 - protein, 135 aa, Zea mays
  Clone ID: UC-ZMFLMO17129F09_FLI.pep
TPKPDLPAIQNVAVLQSVDTAATDANASETGTRLLTKRSIHELVAQIDSNEKLDPEVEDVLIDIAEDFVESVTTFACSLAKHRKSSTLEAKDVLLHAERSWNITLPGFSGDEIKLYKKQHINDIHRERLALVPTF

SEQ ID NO: 71856 - protein, 380 aa, Zea mays
  Clone ID: UC-ZMFLB73006G07_FLI.pep
RCHSQGCGLLEPIRDIELKQFIKGYSDGSKGGDGHLLMLKLKEWPRPSVLEAFLLCQRPEFIVNFPLVDFIHPRWGLLNLAAKLPPDALQPELGMKLLIAHGSHRELGKGDSMTNLMINMSDVVHMLMHATEVHYQCPKRVRVQSDVSEMIANGTSVHVNAHTPVQNLNLDIEEQSHKHSKSHIEEPNTNNSEGSLAGAVWDVFRRQDLPKLNEYLAAHREECAARCQAVSSVKYPIYDQTVYLNDYHKKMLKDQYGIEPFTFHQHIGEAVFIPAGCPFQLKNLQSTVQLALNFLSPESLPESVRLSQEIRCLPNGHLAKLKMLEVKKISLYAASSAVREIQRITLDPKFNLDPSFEDQNLTRAVSENLARVNKRKVSCS

SEQ ID NO: 71857 - protein, 434 aa, Glycine max
  Clone ID: UC-GMROPIC009B09_FLI.pep
RTLMMTMKRLVRVNRDAIAACMTCPLCKKFLKEATAISLCLHTFCRKCIYDKITDEELENCPVCNIDLGIVPLEKMRPDNILQDLRNKIFPFKKRKEKAPVSVSSVLLPARRKERSLSSLVVSTPRVCTQSTMTGRRTKPARKASGLQGSSLSIEKFIKKEEELLEDHQDNLCSPDTSNKSAKNGGQSLSPCKNSQSICNREPQNGAEPQEAKWDLWKTLNYLAEAASRSKPFKSNVQASDAKLESMKMTDSDAKVLKAKIKEKKRKAKVEEEKISTDHASSDTSKPNKLRRVRQKKEPVFGESRISPQAVLDATDRNLLWNDSIWFSLAASENQEGDAPLPQIPSNYVRIKNGSIPVSFIQKLLMKKLGLKSEDEVEIKCMGHPVLPSLQVQNLVDLWGVDTASLGHRISATIGSSGKDFVMILTYGRKVLHP

SEQ ID NO: 71858 - protein, 173 aa, Zea mays
  Clone ID: UC-ZMFLMO17427F10_FLI.pep
NGRYIISASEDSHVYIWRNNDGPKPSRKKGIVSVTDSHEYFHCQSVTVAVTWPFASTAMTCLMNPGKQEELERGSEPQDLQTKLAKAQEMPDVEYRSTNITSNNSNHNNGDRTSPTWPEKLNTPPNQSLRATTCHANEGDQALNRSAWGLVIVTAGRGGQIRTFQNFGFPVRV

SEQ ID NO: 71859 - protein, 505 aa, Zea mays
  Clone ID: UC-ZMFLMO17320E02_FLI.pep
RGERSRGRTRGGDVHRRGREEMPGSQNGGPRPRPVKVETIHDLARAGDLAGVQRKLLENPSLLNDKNPMCQTPLHVAAGYNNTEIVKFLLNQQGTETVDLEAKNMYGETPLHMAVKNSSCGSTNLLLEHGAHIEAKANNGMTPLHLAVWHAIQAGDFSTVSVLLSYNPDCFVKDDEGKMPLNHIPGGAGSEKLLKLLTHHMEEQRKRKALMSCLEGKAMSEFEEAMSQIVGLQELKMQLRRWARGMFFDEKRRAMGLGIAKRRAPHMAFLGNPGTGKTMVARILGKLLHMVGILPTDKVTEVQRTDLVGEFVGHTGPKTRRKIHDAEGGILFVDEAYRLIPMQKSDDKDYGLEALEEIMSVMDSGKIVVVFAGYCEPMKRVIASNDGFCRRVTKFFYFDDFSTTELAEILHMKMKSPSDCSLLYGFKLHPSCSIEAIGELIAREITEEQRKQMNGGLVDTLLINARENLDSRLDFNCNDADTMITITLEDLEAGLRQISRQRHLQ

SEQ ID NO: 71860 - protein, 369 aa, Zea mays; identical to SEQ ID NO: 64224
  Clone ID: UC-ZMFLB73014A09_FLI.pep

SEQ ID NO: 71861 - protein, 278 aa, Zea mays
  Clone ID: UC-ZMFLMO17169A09_FLI.pep
THTKATVFITQAVIAHGAAANARQDAASFIRLGAPTHPRPRQRKARSSRGGGRRGQGDGGDGLLERGAGGDGLPPGLDVGAGGDEPGLGGLAEVEQVGRVVGVGERELVPGEVLVAGQVRLVHVEHLGELLRVLLHHRRVGGAAQERPHEQLEHQRRRVRVEVVRLHLQPHLQLRRRRRRGEQVRALRRVLAGDVPVDRTGLEEDFVSVDESRDLAERVEGEEVGLLVGAGGEVDGDDLEVEALLVEHGGHAHHVGGQRHPVQLQRRHPCCCCLVKSL

SEQ ID NO: 71862 - protein, 370 aa, Zea mays
  Clone ID: UC-ZMFLMO17158H07_FLI.pep
PDSSSTASRITCSDDRCTAGFQTGEAICQTSNSQSSPCGYTFTYGDGSGTSGYYVSDTMFFETAMGNEQTANSSASIVFGCSNSQSGDLTKADRAVDGIFGFGQHQLSVISQLNSLGVSPKVFSHCLKGSDNGGGILVLGEIVEPGLVYTPLVPSQPHYNLNLESIAVNGQKLPIDSSLFTTSNTQGTIVDSGTTLAYLADGAYDPFVSAIAAAVSPSVRSLVSKGSQCFITSSSVDSSFPTVTLYFMGGVAMSVKPENYLLQQASVDNSVLWCIGWQRNQGQEITILGDLVLKDKIFVYDLANMRMGWADYDCSMSVNVTTSSGKNQYVNTGQFDVNGSARRASYKSLIPAGIVTMLVHMLIFGTGSRR

SEQ ID NO: 71863 - protein, 524 aa, Zea mays
  Clone ID: UC-ZMFLMO17202B09_FLI.pep
VFLLVFGGVRRHSSSTALTFFLWSAYLLADSTAIYTLGYLSVDSMSDEHQLVAFWAPFLLLHLGGPDNITAYALEDNALWLRHLQTLAVQVLGAAYVIYEYIASRGALLFLASLSMFFAGLLKYGERIWALKCGNISSIRSSISIRKIKTDPYQLLTLGTSEEDLLLGAHSQFDICKGVFADIIMLPTPLVRSQPKPRSVISYLGEDLYKLVEMELSLMYDFLYTKAAVIHTWYGFCIHFISLFGTATTFLLFQLSISNSGNRYSRVDVAISYVLLVGALVLEIISVCRAVLSTWTCSLLHRRGRGWEWSLHIVTSLGQRVHPASRRLWSGSIGQYNLFHLCTRNTNEIGSRLATKLGLEDWWNKMHFSGTFPHANSSLSIQDIKKLVLQALRSKEQALQHQDTDLNSRGSFILKRMEAYKDFARWSVNIDFDESILVWHIATEVFIRKSKARHAKELLEATEDTVERDLVIRTTQWRHPLQAGTRTIFLRNCSTMMVPVAPGYHGGRSLQRWPGVSPNLHWDQ

SEQ ID NO: 71864 - protein, 696 aa, Zea mays
  Clone ID: 700335924_FLI.pep
SWSRSGSGRVSYFPARHLRALVLTSTEIAMDASAEVDHLAAERSAARFDVEAMKVAWAGSRHAVEVGDRMARLVASDPVFRKDNRTMLSRKDLFKDTLRKAAHAWKRIVELRLTEEEAGMLRLYVDQPGYVDLHWGMFVPAIKGQGTEEQQKKWLPMAYKFQIIGCYAQTELGHGSNVQGLETTATFDPKTDEFVIHSPTLTSSKWWPGGLGKASTHAVVYARLITEGKDYGIHGFIVQLRSLEDHSPLPGVTLGDIGGKFGSGAYNSMDNGVLRFDHVRIPRDQMLMRLSQVTREGKYVHSDVPKQLLYGTMVFVRQTIVADASKALSRAVCIAVRYSAIRKQFGSQDGGPETKVLDYKTQQSRLFPLLASAYAFRFVGDWLKWLYMDVTQKLEAKDYSTLQEAHACTAGLKAVTTSATADAIEECRKLCGGHGYLNSSGLPELFAVYVPACTYEGDNIVLLLQVARILMKTVSQLTSGKQPVGTMAYMGNVQYLMQCKCAVNTAEDWLNPVAIQEAFEARALRMAVNCAQNIGQAANQEEGFYERSPDLLEAAVAHIQLVIVTKFIAKVQQDIPGPGVKEQLQNLCNVYALYILHKHLGDFLATGCITPKQGALANEQLGKLYAQVRPNAVALVDAFNYTDHYLGSVLGRYDGNVYPALYEEAWKDPLNETVVPEGYHEYLRPLLKQQLKLSRL

SEQ ID NO: 71865 - protein, 190 aa, Zea mays
  Clone ID: 700260730_FLI.pep
SNKSIKYQFSPIPHTDHGLVTVVDTACWERTNTKSLDFLSRSEASGRASAGHPRMHVRRHGGGGAPLPLHVRMPSYAHVEASLLELAVLLAERAALAAAVHAAVGAGAHLEAVLRAHLGAVEAGVDALTAGEQHDERVQRPAGAAGRGAPVDDLRGLPERDARAHARHAAVVAVVEAVAEPGGPGGDGRL

SEQ ID NO: 71866 - protein, 133 aa, Zea mays
  Clone ID: 700430501_FLI.pep
TINKHHNKIIHKTYTLLCFAHICKHFTKSFNPKLRTLFNRPRTEVIPKLHTLFNCIQHKALQPVHPIFRYCVTLFCQDRGNTRSSKFNTFLYKPIRTSAFQCPWISLQLTLDEVIGEWAELLNSTYSNISALR

SEQ ID NO: 71867 - protein, 62 aa, Zea mays
  Clone ID: 700469996_FLI.pep
HCLELELHLLCVVELVKVCSHGLVHRRRTTSQDLNVLSRRWTMRLDHFLRHKPNTTVPVLRR

SEQ ID NO: 71868 - protein, 331 aa, Glycine max
  Clone ID: 700842514_FLI.pep
GGLGLRALSKDQLDEILKPAECTIVASLSNDYVDSYVLSESSLFVYPYKIIIKTCGTTKLLLSIPVILKLADALDIAVKSVRYTRGSFIFPGAQSFPHRSFSEEVSVLDSYFSNLGSGSKAYVMGDPSKSQIWHIYSASAQTKGSSEAVYGLEMCMTGLDKESASVFFKENTSSAASMTENSGIRKILPQSDISDFEFDPCGYSMNGIEGSAISTIHVTPEDGFSYASFEAVGYDFNDMALGELVERILACFCPAEFSVALHIDMHGEKLNKFPLDIKGYYCGERSTEELGVGGAVVYQTFVQGCDGSASPRSILKCCWSEDENEDEVREI

SEQ ID NO: 71869 - protein, 251 aa, Zea mays; identical to SEQ ID NO: 47699
  Clone ID: 700047524_FLI.pep

SEQ ID NO: 71870 - protein, 296 aa, Zea mays
  Clone ID: 700051889_FLI.pep
PRPGPVRFDSSYAACIYRVRNAVRLLSSSPCLHPRLSSLRRGPRPRGSGGLVPPDPGRREERGVEVLAGRRQHVEAAVHALDVVVAEIHEQVAGPGAAAVVHPLLLGHHHRRRRRIVVHDLRLRRARLAPRVGLRVGDAHVHGLLLFGCADDAGGCPFPQPHLLPLVLLVVQPAQHPVIQPERPLLSASAGVSEPVLVHDPVRLDPARRLAGVEDERLLDPERAGVGGGGARRDGLVGAGGLPVPVAGGAVGAGAVGVLAVPGREEVPLPGPEERALRQVPRVEPVQVHLGDDGHG

SEQ ID NO: 71871 - protein, 93 aa, Zea mays
  Clone ID: 700165231_FLI.pep
LAASAAARPAICRASAAVTGAVVAGHLPQQPACCSALVARRRRRCLRGHHHHEQLRRHHQEQHAGNHGAAASHRFVPQNQGNEQMDSLLCRWR

SEQ ID NO: 71872 - protein, 190 aa, Zea mays; identical to SEQ ID NO: 71865
  Clone ID: 700260992_FLI.pep

SEQ ID NO: 71873 - protein, 170 aa, Zea mays
  Clone ID: 700237916_FLI.pep
LIWNRSSWTDLFAAVSCLFPPSRPTLGSRLPSCVVRREGRRRRPQEQLLELPLQVLQALPLAVVGGRACLAHGLENVSEDLPGAVIVAFAVVGPDVIQDPLVGVRQDGVRSLDLLEPGLGGVRAAAGAPCAGALVRVPFHGELAVGAAQLGVGAVAGHAQRRVQATLATS

SEQ ID NO: 71874 - protein, 334 aa, Zea mays; identical to SEQ ID NO: 41488
  Clone ID: 700267941_FLI.pep

SEQ ID NO: 71875 - protein, 97 aa, Zea mays
  Clone ID: 700430673_FLI.pep
ISPTIWPLNDLVCPFPDTSDMLHPLGPRKRSSFNIANAFARSKKPSSNVHRPIPGECYRRRSDRRRRQHLAKRSGGSPPSLVADRGRARAHGGWLWR

SEQ ID NO: 71876 - protein, 271 aa, Zea mays
  Clone ID: 700472389_FLI.pep
DTASLYRSERAVGDAVAEAARRGIVASREEVFVTTKMWCSQCHPDLVLPSLKESLQNLQMDYVDLYLVHWPIAAKPGKPQFPFKREDIMPMDLIGVWRAMEECHRLGLARMIGVSNFTTKKLQELLAIAKIPPSVNQVEMNPIWQQKRLAEFCKDKGIHLTAYSPLAGQSTSKVNPVMQSEVLQEVAKARGKSVAQISLRWIYEQGASVVVKSFGRDRLKENVEIFDWELTNEDRRKISQIPQHKRVTVLGILSPDGVSSVDLAELDIVEM

SEQ ID NO: 71877 - protein, 66 aa, Zea mays
  Clone ID: 700445036_FLI.pep
RSVSVVSASSTYSWEIVTNSFTNSYYRRVENQHEEDANRRQNCANHGLGLGSFIYFCGCTLERERE

SEQ ID NO: 71878 - protein, 144 aa, Zea mays
  Clone ID: 700421668_FLI.pep
IYLSRGFAAREAPTTAGEEARFLRSSGAALAAGARFRSRDGGVVARNIGVDLAAVNGLRLGRRRGGRAGVVGAGSWTAVRHWGIGSELRGGGGRDERAGGRVGRSSSSSPGLPCWTGQDRWGAQLAVGKLYTALAELEIQGRVG

SEQ ID NO: 71879 - protein, 271 aa, Zea mays; identical to SEQ ID NO: 71876
  Clone ID: 700472290_FLI.pep

SEQ ID NO: 71880 - protein, 147 aa, Zea mays
  Clone ID: 700581684_FLI.pep
YFRFIQDEAVQKVVEFMDTYSLSQEDFDTIVEVSKFKGHPSPMDGIQPAVKSALTKAYKQGSSSRVVRAADLINIPGMKKPLKKRVAAILEPVEESLPEENGLASAEDDEDGSSDAENNGACSPFPRNKHKKSGRCLFVWLMCQALG

SEQ ID NO: 71881 - protein, 207 aa, Zea mays
  Clone ID: 700615204_FLI.pep
RQLDGQPRHPAAAAMVHVNFYRNYGKTFKKPRRPYEKERLDAELKLVGEYGLRCKRELWRVQYALSRIRNAARELLTLDEKNPRRIFEGEALLRRMNRYGLLGEGQNKLDYVLALTVENFLQRRLQTIVFKNGMAKSIHHARVLIRQRHIRVGRQLVNIPSFMVRVESEKHIDFSLTSPLGGGPAGRVKRKNQKKASGGGDAEEDEE

SEQ ID NO: 71882 - protein, 214 aa, Zea mays
  Clone ID: 700570059_FLI.pep
DTSVVTRRFDAVFTNPSGGAGTLRITSIFNGHWNMSMNYLGLHSLRNRGFRQLIRSYFMSGDRVPDVVVLNSGLHDGCYWTSVRIYAQAADFAAQFWSGVMDKVRARGRAVPRVFYRTTIATGGYARDLAFNPNKMEAFNGVLVEKMRRHGVLTGGVIDNFDMTFPWHYDNRCNDGVHYGRAPAKLVWRDGKVGHQYFVDLMLGHVLLNAICNE

SEQ ID NO: 71883 - protein, 314 aa, Glycine max
  Clone ID: 700725928_FLI.pep
IDRSYNARLGDFGLALRGHVDDYRLRSTPPAGTMGYLDPCYVTPDNLSTKTDVFSFGILLLEIISGRKAIDITYSPPSIVDWAIPLIKKGKLLAVYDPRIAPPKDPIVRKQLAVIAAKCVRSCRERRPSMKELVTWLCGLCKLVPLHSWNGFNNPCMMAEIAGRPVEAAAAAARNYGQFSSRLEGVEEGKFDALDGRLSKSAMRYSRRVYSDLGFSSNLMDLMATTEEPEFLRDADGVEHSSKSAEQVSGSSSRFGSGRYSIRGRNLYRPCWSDKDALGLSKGQILGQSETTSKQDGVSGSNSKNLNSVAAEVI

SEQ ID NO: 71884 - protein, 503 aa, Glycine max
  Clone ID: 700737284_FLI.pep
PDDKVTPMESPSLLQTGLSGAPMDVSRKPSLCIAVIGATGELAKRKIFPALFALYYSGFLPENVGIFGYSRKDITDEDLQSIIASTLTCRVDHQENCDDKLNAFLSRTYYINGGYDNKYGMSMLNARMEQIEGGSKTNRIFYLSVPQEALLDVASCLASSAQTQKGWNRIIFEKPFGFDALSSHRLTQYLLSNFQEKQIYRIDHLLGRNLIENLTVLRFSNLVFEPLWSRTYIDNVQVILSEDLAVHPGRYFSGYGIIRDIVHSHVLQTIALLAMEPPISLDGEDIRNEKLKVLRSIRKLEPKDVILGQYKTSGGAKVDACLNGLTPTYFAAALYIDNARWDGVPFLIKTGLGLIKHQMEIRIQFRNVPGNVYHECIGHNMDRAVNELILRDVPDEAILVRVNNKVPGLGLQLDSSELNLLYKDKYNMEVPDSYEHLLLDVIDGDSHLFMRSDELAAAWNILTPILNEIDKDNMSVELYEMGGRGPVGAYYLWAKHGVRWVED

SEQ ID NO: 71885 - protein, 271 aa, Zea mays; identical to SEQ ID NO: 53331
  Clone ID: 700075058_FLI.pep

SEQ ID NO: 71886 - protein, 283 aa, Zea mays; identical to SEQ ID NO: 53397
  Clone ID: 700049622_FLI.pep

SEQ ID NO: 71887 - protein, 270 aa, Zea mays
  Clone ID: 700083637_FLI.pep
FQIGSRDMGLKVFHWLNRRMHPNTEYCSIHGSKAMEDKDSVPHSVVEKDTEALLLHDVLLNGILAIGTLGHHVDSLCPVACIEEDDLFIMDDEKAIVEERDDEEPRNDQVKEDVALETEPCEPVWPIVEPAKMHSLSMKEDNFTCFVAEEILIREVEDGGGANIQERPLLMLEKVEKVRTTLADLFAAEVFSSSSPREYSCQDIIDVAVASTSKHASCMEKMHQKKPRKPTPKPLKATRKLSRVMRKMLGKKIHPEQLNGRSNAEGPLTA

SEQ ID NO: 71888 - protein, 121 aa, Zea mays
  Clone ID: 700101742_FLI.pep
AGDRVPPGRGVGAAPRRRGAGAVGQDPRRDVPPRRPRHGRPGPPGVQQGRPHEHRRPPPPPQPHTGLPGGSGQDELRRAAAGQGAVEQGVQGLPQGKAPVVAAARCGAIAGGNWGGIGCLG

SEQ ID NO: 71889 - protein, 249 aa, Zea mays
  Clone ID: 700098233_FLI.pep
GPSGNSFANISNSTQLVTTNNLPLQSLEPSNQQHLGRLHSSADPFNSFVGEPPQFADLGRCNTTWPTAVSSSNVQEIGQKDRIVNRPKLEPLSSFTEASSQIPLLGSEMQSHQVASLASNGLPMPFTQEAVPFAYGSSTNSREMLNNNLALSNSGVNSTLPNLRIDGSVVPGQTLGGSNSGGCVVPPLQDGRIDHQAVSSHLNYNNELMGTGRLQRGLSGGLDDIVVDMFRPDRADDGVSFIDGDWELV

SEQ ID NO: 71890 - protein, 334 aa, Zea mays; identical to SEQ ID NO: 41488
  Clone ID: 700260940_FLI.pep

SEQ ID NO: 71891 - protein, 589 aa, Zea mays
  Clone ID: 700471556_FLI.pep
ADCNHADGTVTVIEAPRQSDLLIELIRKLQPQVVVTGMAQFEAITSAAFENLLNVTKDVGSRLFLDISEHLELSSLPSSNGVLKYLAGKTLPSHAAILCGLVKNQVYSDLEVAFAISEDAAVYKALSQTIELLEGHTSLISQHYYGCLFHELLAFQIADRHPQQERQPAEVIPQQMIGFSDPAVSTLKATEFFVPGSAESSIIHMDLDRSFLPVPSAVNASVFESFVRQNITDSETDVRSSIQQLVKDSYGLSAAGCAEIIYGNTSVALFNKLVLCCMQEQGTLLFPLGTNGHYVSAAKFVNASTVTIPTNPSSGFRIEPKVLADTLKNVSRPWVYVCGPTINPTGFLYSDSDIRELLSVCAEYGARVVIDTSFSGLEYETDGWRQWNLAGCLSSLKRSEPSFSVVLLGELSFALTAGGHDFGFVILGDSSLAETFHSFSSLSRPHTTLKYTFKKLLGLKNQKDQHFSDLIVEQKEELKNRANQLIQTLESCGWEAAIGCGGISMLAKPTAYMGKAFKAAGFDGELDASNIREAILRATGLCINSSSWTGIPGYCRFSFALERGEFERAMGCIARFKELVLGGAQMNGA

SEQ ID NO: 71892 - protein, 358 aa, Zea mays
  Clone ID: 700471623_FLI.pep
GPQCLQLARFVTLFINCAFYSVFKLSYCFVKRGDTTEDDALQLDSGLVLDQILSGNETYMMHKTRHDSVPLTQMDCVRALRQFLCAKVMDLNRNVIDFGEYVGTCRDIQRSFADGECLDNVFMQCFIDCVRDDATNHIPPLTAHQLILDAIVGAILNFEEQEQHSNTHRPYDPAILENYLSKTLPSFKQLDEYKSIMVPMLRAGHWTLYVINFQNRCIHILDSNPYGPELGETTWESYHYVQMDIGKRKLPWARLIMVRLNMALQHVRPRSNLPRFDNFPIDMAPNCPTMKAGSNDCGFFAMRYIQYYDYMDGAINVVIDSDNSGDLRALALYYLIFHRLNKNRSLSPELERFKFPHY

SEQ ID NO: 71893 - protein, 112 aa, Zea mays; identical to SEQ ID NO: 42211
  Clone ID: 700153565_FLI.pep

SEQ ID NO: 71894 - protein, 670 aa, Zea mays
  Clone ID: 700452526_FLI.pep
RALVPSPSTLQDLALPPPPPSQGRGERPAASRRAEEEDERESGASRPGRMFGRDPWGGPLEISNADSATDDDRSRDLDRAALMRQLDETQQSWLLAGPGDQAGKKKKRYVDLGCLVVDRKVFMWTVGTVLGLGVFIGFVIMIVKLVPHKRPPPPPPDQYTQALHKALMFFNAQRSGPLPKHNGVSWRGNSCMKDGLSDSTVRRSLVGGFYDAGDAIKFNYPMAWSMTMLSWSVIEYRAKYEAIGELDHIRELIKWGTDYILKTFNSSADTIDRIVAQVGVGDTSKGSSQPNDHYCWMRPEDIDYKRPVTECHSCSDLASEMAAALAAASIVFKDSKTYSDKLVKGAKALYKFGRLQRGRYSPNGSDQAIFYNSTSYWDEFVWGGAWMYFATGNNSYLTVATAPGMAKHAGAYWFGSPNYGVFTWDDKLPGAQVLLSRLRLFLSPGYPYEEILRTFHNQTDNVMCSYLPVFNSFNFTKGGLIQLNHGRPQPLQYAVNAAFLASLYSDYLEAADTPGWYCGPNFYTIEVLRKFARSQLDYILGKNPLKMSYVVGFGNKYPKRPHHRGASIPHNGVKYGCKGGYKWRDTKKANPNILVGAMVAGPDRRDGYKDVRTNYNYTEPTLAANAGLVAALISISDIKTGRFGIDKNTIFSAIPPMFPTPPPPPSAWKP

SEQ ID NO: 71895 - protein, 207 aa, Zea mays; identical to SEQ ID NO: 71881
  Clone ID: 700614788_FLI.pep

SEQ ID NO: 71896 - protein, 460 aa, Glycine max; identical to SEQ ID NO: 43986
  Clone ID: 700554189_FLI.pep

SEQ ID NO: 71897 - protein, 251 aa, Glycine max
  Clone ID: 700658184_FLI.pep
KMPIRNIAVGRPEEATHPDTLKAALAEFISTFIFVFAGSGSGIAYNKLTDNGAATPAGLISASIAHAFALFVAVSVGANISGGHVNPAVTFGAFVGGNITFLRGIVYVIAQLLGSIVASLLLAFVTASTVPAFGLSAGVGVGNALVLEIVMTFGLVYTVYATAIDPKKGNLGIIAPIAIGFIVGANILLGGAFSGAAMNPAVTFGPAVVSWTWTNHWIYWAGPLIGGGIAGLVYEVVFISHTHEQLPTTDY

SEQ ID NO: 71898 - protein, 338 aa, Glycine max
  Clone ID: 700669647_FLI.pep
RRYQTTPIYAIEDSNGRDRMLKYTPEHMHCLAMFWGPLAPPNTGVVAFQNLSNNQATFRITATAVVLEFNHAARIVKKIKLVGYPCKIFKKTALIKDMFTSDLEVARFEGAAIRTVSGIRGQVKKAAKEEIGNQAKRKGGQTKEGIARCTFEDKILMSDIVFLRAWTQVEVPQFYNPLTTALQPRDMTWKGMKTVAELRREHNLAIPVNKDSLYKKIERKPRKFNPVVIPKSLQASLPFASKPKDISKRKKPLLEERRARGVVMEPRERKVHTLVQHLQLIDREKMKKRKLKEENKRKALEAESAKEELLLRKRRREERRDKYRKEDKQNKKIRRAEV

SEQ ID NO: 71899 - protein, 245 aa, Glycine max
  Clone ID: 700664839_FLI.pep
LSLHSLSGSSSVEWIQGSLVSQRQPLTWYKTTFDAPAGTAPLALDMDSMGKGQVWLNGQNLGRYWPAYKASGTCDYCDYAGTYNENKCRSNCGEASQRWYHVPQSWLKPTGNLLVVFEELGGDPNGIFLVRRDIDSVCADIYEWQPNLISYQMQTSGKAPVRPKVHLSCSPGQKISSIKFASFGTPAGSCGNFHEGSCHAHKSYDAFERNCVGQNWCTVTVSPENFGGDPCPNVLKKLSVEAICS

SEQ ID NO: 71900 - protein, 338 aa, Glycine max; identical to SEQ ID NO: 71898
  Clone ID: 700668858_FLI.pep

SEQ ID NO: 71901 - protein, 385 aa, Glycine max; identical to SEQ ID NO: 44000
  Clone ID: 700736460_FLI.pep

SEQ ID NO: 71902 - protein, 489 aa, Glycine max; identical to SEQ ID NO: 43983
  Clone ID: 700733405_FLI.pep

SEQ ID NO: 71903 - protein, 423 aa, Glycine max; identical to SEQ ID NO: 43754
  Clone ID: 700746279_FLI.pep

SEQ ID NO: 71904 - protein, 519 aa, Glycine max; identical to SEQ ID NO: 43902
  Clone ID: 700676283_FLI.pep

SEQ ID NO: 71905 - protein, 385 aa, Glycine max; identical to SEQ ID NO: 44000
  Clone ID: 700735923_FLI.pep

SEQ ID NO: 71906 - protein, 565 aa, Glycine max; identical to SEQ ID NO: 43888
  Clone ID: 700676932_FLI.pep

SEQ ID NO: 71907 - protein, 385 aa, Glycine max; identical to SEQ ID NO: 44000
  Clone ID: 700733146_FLI.pep

SEQ ID NO: 71908 - protein, 356 aa, Glycine max
  Clone ID: 700751125_FLI.pep
KGMITGGAAATVFYNLRQKHPTLDMPVIDYDLALLFQPVLVLGISIGVAFNVIFADWMITVLLLIIFVGIATKAFLKGVETWKKETIIKKETARQSQFNGTERTAEVAYEPLPGGPNTSNHKEPKKSKETGSILENVRWKALGVLFTVWVLILASEIAKSHTTTCSVEYWVLNLLQVPVALGATSYQAVLLYTGKRVIASKGDQRTQWRAHQLIMYCSCGICAGIVGGLLGLGGGFILGPLFLELGIPPQVSSATATFAMTFSASMSVVEYYLLKRFPIPYTLYFVAVSTFAAFVGQVLVRKLVAILGRASLIIFILSSTIFVSAISLGGVGISNMIQRIANKEYMGFENLCTYSA

SEQ ID NO: 71909 - protein, 489 aa, Glycine max; identical to SEQ ID NO: 43983
  Clone ID: 700758127_FLI.pep

SEQ ID NO: 71910 - protein, 385 aa, Glycine max; identical to SEQ ID NO: 44000
  Clone ID: 700836572_FLI.pep

SEQ ID NO: 71911 - protein, 385 aa, Glycine max; identical to SEQ ID NO: 44000
  Clone ID: 700838556_FLI.pep

SEQ ID NO: 71912 - protein, 385 aa, Glycine max; identical to SEQ ID NO: 44000
  Clone ID: 700841967_FLI.pep

SEQ ID NO: 71913 - protein, 385 aa, Glycine max; identical to SEQ ID NO: 44000
  Clone ID: 700842282_FLI.pep

SEQ ID NO: 71914 - protein, 378 aa, Glycine max
  Clone ID: 700753668_FLI.pep
LKSNLPLFLLPPTSPSSSSIMSHFKGKYHDELIANAAYIGTPGKGILAADESTGTIGKRLASISVENVESNRRALRELLFTAPGALKYLSGVILFEETLYQSTAAGKPFVEVLKEAGVLPGIKVDKGTVELAGTNGETTTQGLDGLGQRCAKYYEAGARFAKWRAVLKIGPNEPSELAIHENAYGLARYAVICQENGLVPIVEPEILVDGSHDIHKCAAVTERVLAACYKALNDHHVLLEGTLLKPNMVTPGSNSAKVSPQVVAEHTVRALQRTVPAAVPAIVFLSGGQSEEEASVNLNAINQVNGKKPWSLSFSFGRALQQSTLKAWSGKEENVKKAQEALLVRAKANSEATLGTYKGNSKLADGASESLHVEDYKY

SEQ ID NO: 71915 - protein, 172 aa, Glycine max
  Clone ID: 700835168_FLI.pep
LVVVAKTGNEAATRILARQLVRLRQQITNLQGSRAQIRGVATHTQALYASTSISTGMKGATKAMVTMNKQMAPAKQVKVIKEFQKQSAQLDMTIEMMSESIDETLDKDEAEEETEELTNQVLDEIGVDIASQLSSAPKGRIASRNTENVAPRPAESQDVEELEKRLASLRRI

SEQ ID NO: 71916 - protein, 423 aa, Glycine max; identical to SEQ ID NO: 43754
  Clone ID: 700747550_FLI.pep

SEQ ID NO: 71917 - protein, 421 aa, Glycine max; identical to SEQ ID NO: 45874
  Clone ID: 700751645_FLI.pep

SEQ ID NO: 71918 - protein, 441 aa, Glycine max; identical to SEQ ID NO: 45632
  Clone ID: 700759156_FLI.pep

SEQ ID NO: 71919 - protein, 442 aa, Glycine max; identical to SEQ ID NO: 44712
  Clone ID: 700854609_FLI.pep

SEQ ID NO: 71920 - protein, 385 aa, Glycine max; identical to SEQ ID NO: 44000
  Clone ID: 700854907_FLI.pep

SEQ ID NO: 71921 - protein, 350 aa, Glycine max
  Clone ID: 700898775_FLI.pep
SLVEEAASLDLNNASGSGSLPRLQTLKKTSISSRRSGTATFPSPGTLNYRVAMHKGWSSERVPLHAGATRKHVLPFNNGKTLPSKWEDAERWILSPVSADGTGRASLNAPQRRPKSKSGPLGPPGVAYHSMYSPAAPVFEVGNGGSFMEGSPFTGDGLIICTGGHGGALSVRTEPCMARSASVHGCSKIQSQSSSMPLQEDKFGGFKDVGTNVSRATSRRDMATQMSPQGSSRSSPNLRPSFSASTPSTLPVTELRTVGSSKVDIRDVQVDEHVTVTRWSKKHRALFTGRGSEKVESWKKELSTQSSTWDVSETSKPASKTRSEEAKISAWENLQKAKAEAAIRKLEVTS

SEQ ID NO: 71922 - protein, 423 aa, Glycine max; identical to SEQ ID NO: 43754
  Clone ID: 700852561_FLI.pep

SEQ ID NO: 71923 - protein, 423 aa, Glycine max; identical to SEQ ID NO: 43754
  Clone ID: 700900903_FLI.pep

SEQ ID NO: 71924 - protein, 442 aa, Glycine max; identical to SEQ ID NO: 44712
  Clone ID: 700849923_FLI.pep

SEQ ID NO: 71925 - protein, 273 aa, Glycine max; identical to SEQ ID NO: 44461
  Clone ID: 700899141_FLI.pep

SEQ ID NO: 71926 - protein, 109 aa, Zea mays
  Clone ID: 701170773_FLI.pep
ASTRPFLFLAGATDERVLVRPGRRRRYRRAPPAAVSVLQDERHLALPLQGQPLLRAAAQLLQAPAAHLLRLEHLEQVQQAAGKEEEAPEQAEPRPVPPQYHEAGVAAAA

SEQ ID NO: 71927 - protein, 531 aa, Glycine max
  Clone ID: 700832074_FLI.pep
NILMAEHGFDGHDVGYVPEDPNFPQNHSDEHDVGTVIDSSGFPHLLPDEDDAGNLMEDANFPENDFVGHEHDVGGLAGDADSPPEEHVEEVHGAGDVPEDFDSLPKQGSEIDSKGNEIKKWPGWPGENVFRMLVPVQKVGSIIGRKGEFIKKITEETKARIKILDGPPGISERAVMVSAKEEPDCPIPPAVDGLLRVHKQVINVDRDLADSALAAGRSVVTRLLVADTQAGSLIGKQGSTIKSIQDGSGCTIRVLGSENLPIFALRDDSIVEIQGESAGVHKAVELIAVHLRKFLVDRSIVGVFETQMQMSDVRVNQNLPPHQNWGPPPQGFPAPAGGGGGGGPAFAPNHQYMPPSHHYDSYYPPTELPPMDKHLHQGPPPAYARDASMGIHSSSAQPQQSVVTKVTQHMQIPLTYADAVIGASGTNISYIRRASGASITIQETRGVPGEMTVEISGTSSQIQAAQQLVQNFMAEAASATQDPMGGSVSQGYSAYPTTAPVYAPPPTSAGGHTGHAPSADYGPVYGTNYGY

SEQ ID NO: 71928 - protein, 116 aa, Zea mays
  Clone ID: 701182018_FLI.pep
IQFHLKDSTVASPRQSHRLVYSRATIVQPNKFVTDILLAGTEEAESFLVIVPQRTVPSQRLHSCIPKTVTYVIKGNNSSAKQVCSDRFTFGRNRSSRIFLGYCSTKDKMRQMESPE

SEQ ID NO: 71929 - protein, 423 aa, Glycine max; identical to SEQ ID NO: 43754
  Clone ID: 700745792_FLI.pep

SEQ ID NO: 71930 - protein, 505 aa, Glycine max
  Clone ID: 700675966_FLI.pep
LVLKHSSVITMAKLVFSLCFLLFSGCCFAFSSREQPQQNECQIQKLNALKPDNRIESEGGLIETWNPNNKPFQCAGVALSRCTLNRNALRRPSYTNGPQEIYIQQGKGIFGMIYPGCPSTFEEPQQPQQRGQSSRPQDRHQKIYNFREGDLIAVPTGVAWWMYNNEDTPVVAVSIIDTNSLENQLDQMPRRFYLAGNQEQEFLKYQQEQGGHQSQKGKHQQEEENEGGSILSGFTLEFLEHAFSVDKQIAKNLQGENEGEDKGAIVTVKGGLSVIKPPTDEQQQRPQEEEEEEEDEKPQCKGKDKHCQRPRGSQSKSRRNGIDETICTMRLRHNIGQTSSPDIYNPQAGSVTTATSLDFPALSWLRLSAEFGSLRKNAMFVPHYNLNANSIIYALNGRALIQVVNCNGERVFDGELQEGRVLIVPQNFVVAARSQSDNFEYVSFKTNDTPMIGTLAGANSLLNALPEEVIQHTFNLKSQQARQIKNNNPFKFLVPPQESQKRAVA

SEQ ID NO: 71931 - protein, 323 aa, Glycine max
  Clone ID: 700960460_FLI.pep
FSIVGYSSEDLKSMDKLIELFESWMSKHGKIYQSIEEKLLRFEIFKDNLKHIDERNKVVSNYWLGLNEFADLSHQEFKNKYLGLKVDYSRRRESPEEFTYKDVELPKSVDWRKKGAVAPVKNQGSCGSCWAFSTVAAVEGINQIVTGNLTSLSEQELIDCDRTYNNGCNGGLMDYAFSFIVENGGLHKEEDYPYIMEEGTCEMTKEETEVVTISGYHDVPQNNEQSLLKALANQPLSVAIEASGRDFQFYSGGVFDGHCGSDLDHGVAAVGYGTAKGVDYIIVKNSWGSKWGEKGYIRMRRNIGKPEGICGIYKMASYPTKKK

SEQ ID NO: 71932 - protein, 273 aa, Glycine max; identical to SEQ ID NO: 44461
  Clone ID: 701011990_FLI.pep

SEQ ID NO: 71933 - protein, 59 aa, Glycine max; identical to SEQ ID NO: 44171
  Clone ID: 701051839_FLI.pep

SEQ ID NO: 71934 - protein, 274 aa, Glycine max; identical to SEQ ID NO: 42938
  Clone ID: 701057038_FLI.pep

SEQ ID NO: 71935 - protein, 191 aa, Glycine max
  Clone ID: 700998705_FLI.pep
NLFLLTMHSHIERILWSEDQISRRVFELAAEISDDFGGHSPAPVVVGVATGAFLFLADLVRKIDLSIAVDFVRVESYGSGTVSNGAPTISFDLKVDVNSRHVIVVEDIVDTGHTLSKVIEHLKSKGASSVSVCTFLDKPARRKVHFQLVGEGKYYRGFECPNYFVVGYGLDFAELYRNLPYIGVLKPELYK

SEQ ID NO: 71936 - protein, 191 aa, Glycine max; identical to SEQ ID NO: 71935
  Clone ID: 700998785_FLI.pep

SEQ ID NO: 71937 - protein, 274 aa, Glycine max; identical to SEQ ID NO: 42938
  Clone ID: 701042751_FLI.pep

SEQ ID NO: 71938 - protein, 92 aa, Glycine max
  Clone ID: JC-GMFL02220114C04_FLI.pep
SGRKNNDVTLLGLTALDLVMMALLFSANGAACAVGVIAQKGNSHVQWMKVCNVFDAYCRHVTAALVLSLFGSTVFLLLVLLSVLKLHYRTRS

SEQ ID NO: 71939 - protein, 59 aa, Glycine max; identical to SEQ ID NO: 44171
  Clone ID: 700901520_FLI.pep

SEQ ID NO: 71940 - protein, 454 aa, Glycine max
  Clone ID: UC-GMFLMINSOY067F04_FLI.pep
VDDKYEDLQRMYNLFRRVSDGLTIVKDVMTSFVRDTGKQLIMDPERLRDPVDFVQRLLDLKDKYDRVITMSFNNDKTFQNALNSSFEYFINLNARSPEFISLFVDDKLRRGLKGVGEEDVEIVLDKVMMLFRYLQEKDVFEKYYKQHLAKRLLSGKTISDDAERSLIVKLKTECGYQFTSKLEGMFTDMKTSHDTMQGFYANLGTELGDGPMLSVQVLTTGSWPTQPSPPCNLPVEILGVCDKFRTYYLGTHNGRRLSWQTNMGTADLKATFGKGQKHELNVSTYQMCVLMLFNSAERLTCKEIEQATAIPMSDLRRCLQSLACVKGKNVLRKEPMSKDIAEDDAFFFNDKFTSKFFKVKIGTVVAQRESEPENLETRQRVEEDRKPQIEAAIVRIMKSRRTLDHNNIVAEVTKQLQSRFLPNPVVIKKRIESLIEREFLERDKVDRKLYRYLA

SEQ ID NO: 71941 - protein, 116 aa, Zea mays
  Clone ID: LIB3245-010-D6_FLI.pep
YSMTSSMHKQRSSIPCQSIVCRPRGNGVEHPPFPSLEKPLLILGDHETLVVFPAHLVPERPDNVTVQRQLPQPCPPAPGLPLLVAPSMVRTAGSLAGYGVHGAAREDLPLEQQPPA

SEQ ID NO: 71942 - protein, 302 aa, Zea mays
  Clone ID: LIB3245-415-F2_FLI.pep
TSSELMSYMHLLYEICPFYKFGYMSANGAIAEAIKGENFVHIIDFQIAQGSQWVTLLQALAARPGGPPYIRITGIDDSNSAYARGGGLDIVGRTLCDVANSCGLPFEFNAVPAASHEVELQHLAIRHGEIIAVNFAYQLHHVPDESVSTENHRDRIIRMIKSINPRVVTLVEQESNTNTAPFFPRYMETLNYYTAMFESIDVALPRDDRRRMSAEQHCVARDIVNLIACEGAERVERHELFGKWKSRFAMAGFRPYPLSSVVNNTINTLLHTYNSYYRLEERDGVLYLGWKNRVLVVSSAWC

SEQ ID NO: 71943 - protein, 132 aa, Zea mays; identical to SEQ ID NO: 42275
  Clone ID: 700621069_FLI.pep

SEQ ID NO: 71944 - protein, 194 aa, Zea mays
  Clone ID: LIB3078-052-F9_FLI.pep
GEKLGYTCKMDMAMASFVAATHHHGSHLAAGFPYSARAGRSVGRSGVTISIRAQKKSNSDSGSSSGGGDVRTSSGRRVWRRRKLTKEDDMLRYKLDRIPFLEEKVRKVRENGKIICLDINQLMLSQENRFAFTMEVAEEANAYLEKNRHEYGLKKPILHVLSDRMNESGFSRPEGYLYPYPIKPGPYFIKEEGN

SEQ ID NO: 71945 - protein, 228 aa, Glycine max
  Clone ID: UC-GMROPIC107C12_FLI.pep
SLSSLVLLLAALILSPQVLANYENPPVYKPPTEKPPVYKPPVEKPPVYKPPVENPPIYKPPVEKPPVYKPPVEKPPVYKPPVEKPPVYKPPVEKPPVYKPPVEKPPVYKPPVEKPPVYKPPVEKPPVYKPPVEKPPVYKPPVEKPPVYKPPVEKPPVYKPPVEKPPVYKPPVEKPPVYKPPVEKPPVYKPPVEKPPIYKPPVEKPPVYKPPYGKPPYPKYPPTDDTHF

SEQ ID NO: 71946 - protein, 98 aa, Glycine max; identical to SEQ ID NO: 53363
  Clone ID: 701100071_FLI.pep

SEQ ID NO: 71947 - protein, 261 aa, Glycine max; identical to SEQ ID NO: 54670
  Clone ID: 701214219_FLI.pep

SEQ ID NO: 71948 - protein, 274 aa, Glycine max; identical to SEQ ID NO: 42938
  Clone ID: 701207668_FLI.pep

SEQ ID NO: 71949 - protein, 181 aa, Zea mays
  Clone ID: 700321755_FLI.pep
HTASYPHVHTTEPHLLHCLPLTYIVNTQRGIYIHVQRLHSGSCYVRTSVARHPLVASCSFWRARRPHILAVTILMSVSATSSRRPRPWRPSRSSSSFSRSSRPWRSLSPRPPWRSSRSSSSSCSRSSWPPLSLGPGRNPFSRREPSTSSTSSALEANDSALATRSSFCSTLSAPARNTFSF

SEQ ID NO: 71950 - protein, 363 aa, Zea mays
  Clone ID: 700095157_FLI.pep
RGGRSTPPAVGMYKNQLQELAQRSCFSLPSYVCTREGPDHAPRFRAAVTFNGETFEGPSGCTTLRQAEHAAAEVALARLSLRGPSTTLAARVLDETGVYKNLLQETAHRAGLKLPAYTTVRSGPGHSPVFSSTVELAGLSFAGDPARTKKQAEKNAAMAAWSSLKQMPEARKEPGAGDEQEHVAVARALAALKPRDGGDGKAAPPLQKHSSNGSSSSALPNPSLYRHQWRPRTSTPAQPLPPRTGALPLQPPAGPRILPPLHLLQQPACGSRDAAAAELVRMLERAMVRDREATPPSPCYYAAPAASAYRHGSAPRTFAAGGFHAPAVSVRSVIPVCAAPPPQTPVKEERNGPATPSGACKRA

SEQ ID NO: 71951 - protein, 107 aa, Zea mays; identical to SEQ ID NO: 50211
  Clone ID: 700620915_FLI.pep

SEQ ID NO: 71952 - protein, 107 aa, Zea mays; identical to SEQ ID NO: 50211
  Clone ID: 700620769_FLI.pep

SEQ ID NO: 71953 - protein, 157 aa, Zea mays
  Clone ID: 700440385_FLI.pep
ESQRGYLAPEYIMFGKPTAGCDVYSFGIILLELASGKRPIEKSCSVKTYGIRNWVLPLARQGRYDEIADSKLSDKFSESELRRMVLVGLACTHSESEKRPTMLEVVPLLKGESKETLIKLERDELFSSDSMVSSQGTPTPDGGTDSVPKEDQELVGA

SEQ ID NO: 71954 - protein, 423 aa, Glycine max; identical to SEQ ID NO: 43754
  Clone ID: 701039358_FLI.pep

SEQ ID NO: 71955 - protein, 670 aa, Zea mays; identical to SEQ ID NO: 71894
  Clone ID: 700453682_FLI.pep

SEQ ID NO: 71956 - protein, 519 aa, Glycine max; identical to SEQ ID NO: 43902
  Clone ID: 700645702_FLI.pep

SEQ ID NO: 71957 - protein, 489 aa, Glycine max; identical to SEQ ID NO: 43983
  Clone ID: 700733269_FLI.pep

SEQ ID NO: 71958 - protein, 489 aa, Glycine max; identical to SEQ ID NO: 43983
  Clone ID: 700735374_FLI.pep

SEQ ID NO: 71959 - protein, 466 aa, Glycine max
  Clone ID: 700676992_FLI.pep
REQAQQNECQIQKLNALKPDNRIESEGGFIETWNPNNKPFQCAGVALSRCTLNRNALRRPSYTNGPQEIYIQQGNGIFGMIFPGCPSTYQEPQESQQRGRSQRPQDRHQKVHRFREGDLIAVPTGVAWWMYNNEDTPVVAVSIIDTNSLENQLDQMPRRFYLAGNQEQEFLKYQQQQQGGSQSQKGKQQEEENEGSNILSGFAPEFLKEAFGVNMQIVRNLQGENEEEDSGAIVTVKGGLRVTAPAMRKPQQEEDDDDEEEQPQCVETDKGCQRQSKRSRNGIDETICTMRLRQNIGQNSSPDIYNPQAGSITTATSLDFPALWLLKLSAQYGSLRKNAMFVPHYTLNANSIIYALNGRALVQVVNCNGERVFDGELQEGGVLIVPQNFAVAAKSQSDNFEYVSFKTNDRPSIGNLAGANSLLNALPEEVIQHTFNLKSQQARQVKNNNPFSFLVPPQESQRRAVA

SEQ ID NO: 71960 - protein, 385 aa, Glycine max; identical to SEQ ID NO: 44000
  Clone ID: 700836727_FLI.pep

SEQ ID NO: 71961 - protein, 385 aa, Glycine max; identical to SEQ ID NO: 44000
  Clone ID: 700836729_FLI.pep

SEQ ID NO: 71962 - protein, 505 aa, Glycine max; identical to SEQ ID NO: 71930
  Clone ID: 700762856_FLI.pep

SEQ ID NO: 71963 - protein, 565 aa, Glycine max; identical to SEQ ID NO: 43888
  Clone ID: 700762965_FLI.pep

SEQ ID NO: 71964 - protein, 274 aa, Glycine max; identical to SEQ ID NO: 42938
  Clone ID: 700835631_FLI.pep

SEQ ID NO: 71965 - protein, 563 aa, Glycine max
  Clone ID: 700837545_FLI.pep
LRERENKTINTMASEQMPRRENNSNRVIEREVHVETHRKESLPDKGRVVIESEKKEKERELASDRARSGNIVKEDKEVEEGRRGKESGGGGGVQHERKFETKVEEKKGFGEKAELEGITRVVVGRECSKEEKQGRTREKVEAEKARSMEKTRDEAKGREQAETKGQTKKGGGEEQGRRREEIGEENKQSSLEEISKCRAEAEEKVKERKERSKQAASNEAAKERNKQANKEATKAKDVTREKGQQGNLKTGNETQDIGQKGYGGAKDTIGRVDNITTPLAKKAQVAGSTTVQYAGEKSAQAKDATVGSMEKTTKDAKGREKAGTKGQTKKGGGEEQGKRREETGEEKQSSLEEISKHRAEAQQKAMSSIEGAKERYERAKQEASKASKERNIQANKRAEEERRKAESGRGVHVDKFEEKKDSVLKAELERRTREVEGREWNKEEKQRSCPRGKVEAEKARPMEETKLEAKGREKAETKEGGGEEKGMRREEIGEENKQSSLEEIFKYRAEAQQKVKERNERAKQAAEAAKERNKQANKGNEEGRRERESGGGVHHEAKFETKG

SEQ ID NO: 71966 - protein, 423 aa, Glycine max; identical to SEQ ID NO: 43754
  Clone ID: 700747484_FLI.pep

SEQ ID NO: 71967 - protein, 489 aa, Glycine max; identical to SEQ ID NO: 43983
  Clone ID: 700763412_FLI.pep

SEQ ID NO: 71968 - protein, 423 aa, Glycine max; identical to SEQ ID NO: 43754
  Clone ID: 700833227_FLI.pep

SEQ ID NO: 71969 - protein, 423 aa, Glycine max; identical to SEQ ID NO: 43754
  Clone ID: 700835739_FLI.pep

SEQ ID NO: 71970 - protein, 385 aa, Glycine max; identical to SEQ ID NO: 44000
  Clone ID: 700853302_FLI.pep

SEQ ID NO: 71971 - protein, 385 aa, Glycine max; identical to SEQ ID NO: 44000
  Clone ID: 700852388_FLI.pep

SEQ ID NO: 71972 - protein, 109 aa, Zea mays; identical to SEQ ID NO: 71926
  Clone ID: 701167890_FLI.pep

SEQ ID NO: 71973 - protein, 466 aa, Glycine max; identical to SEQ ID NO: 71959
  Clone ID: 700677092_FLI.pep

SEQ ID NO: 71974 - protein, 274 aa, Glycine max; identical to SEQ ID NO: 42938
  Clone ID: 701060995_FLI.pep

SEQ ID NO: 71975 - protein, 423 aa, Glycine max; identical to SEQ ID NO: 43754
  Clone ID: 701048324_FLI.pep

SEQ ID NO: 71976 - protein, 292 aa, Glycine max
  Clone ID: 701013436_FLI.pep
LCGRRYKMKVKKQKRHRKILTFYTACFGFRKPYKVLCDGTFVHHLLVNRITPADTAIGNVLSATIKLYTTRCVLAELKRLGSSYSEALEAAHKLIVARCEHEKCKSADACIMEVVGEKNSEHFFVASQDTDLRKQLQEVPGVPLIFGLRNALFLESPSAFQRQYVKTSEEGRLHMTQKEYQIFKDRVMNRLTGEEANNSITEIMEIEDSEDQTINVQAVEKGITSRNRMEIKDKPQFKRKRAKGPNPLSCKKKKSEKQNIGPLKETNEDNTVKRSRKRKRSHKQKMATETSS

SEQ ID NO: 71977 - protein, 442 aa, Glycine max; identical to SEQ ID NO: 44712
  Clone ID: 700762533_FLI.pep

SEQ ID NO: 71978 - protein, 267 aa, Glycine max
  Clone ID: UC-GMFLMINSOY008A12_FLI.pep
FVVSYKLVYREENMKLFVFFVAAVVLVAWPCHGAGYQRFPLRMKTGYGERSSEVKCASFRLAVEAHNIRAFKTIPEECVEPTKDYINGEQFRSDSKTVNQQAFFYASEREVHHNDIFIFGIDNTVLSNIPYYEKHGYGVEEFNETLYDEWVNKGDAPALPETLKNYNKLLSLGFKIVFLSGRYLDKMAVTEANLKKAGFHTWEQLILKDPHLITPNALSYKSAMRENLLRQGYRIVGIIGDQWSDLLGDHRGESRTFKLPNPMYYIE

SEQ ID NO: 71979 - protein, 267 aa, Glycine max; identical to SEQ ID NO: 71978
  Clone ID: UC-GMFLMINSOY014D08_FLI.pep

SEQ ID NO: 71980 - protein, 454 aa, Glycine max; identical to SEQ ID NO: 71940
  Clone ID: UC-GMFLMINSOY037A03_FLI.pep

SEQ ID NO: 71981 - protein, 357 aa, Glycine max; identical to SEQ ID NO: 42237
  Clone ID: UC-GMFLMINSOY115E11_FLI.pep

SEQ ID NO: 71982 - protein, 227 aa, Zea mays
  Clone ID: LIB3245-080-A10_FLI.pep
REPVGLRPRARRVPPVRGVQRGRPGPRGAGGHHQRRRRGRPPPRGVGPRGRNAGRAPPREAARRQGGGVRGPRLRPHGAVVQHAPVTGVPVLRVPAGLHRRRGGRGRRGGRQDRALHGPARRGAARSVAPPRGSGRGQAAAAAVADRARVGGVRAGAGQHVRRVAGRGPTQADGADGVPRREARRRALPLLAARRAGLRVGVAVLTAGSTPPPPQPRASRESTTSPG

SEQ ID NO: 71983 - protein, 400 aa, Zea mays
  Clone ID: LIB3245-270-H12_FLI.pep
RNLVQLENAYYSMRSSVDTCETNVIKRPDNEALRVRENFHQRHSDSDAKGEKTDRLGCFFDGLCKYARHNRFEVRGILKNADVLSSPNVICSLSFDRDEEYFAAAGVSKKIKIFEFDALLNDRVDIHYPLVEMPSKSKLSCVCWNSYIKNYLASTDYDGTVQLWDAGSGQGFTQFTEHRKRAWSVSFSQVDPTKLASGSDDCCVKVWSINQKNSIDTIRNVANVCCVQFSPYSSRMLAFGSADYKIYCYDLRNTRIPWCTISGHGKAVSYVRFLDPETLISASTDNTLKIWDLNQTNCSGLSADSCSLTLNGHSNEKNFVGLSVHDGYITCGSETNEVFSYYKDFPMPITSHRFGSIDPITGQVTNEDNQQFVSSVCWRGKSNMVVAANSSGSIKVLELV

SEQ ID NO: 71984 - protein, 485 aa, Zea mays; identical to SEQ ID NO: 53388
  Clone ID: LIB3245-414-G2_FLI.pep

SEQ ID NO: 71985 - protein, 249 aa, Zea mays; identical to SEQ ID NO: 71889
  Clone ID: 700154332_FLI.pep

SEQ ID NO: 71986 - protein, 228 aa, Glycine max; identical to SEQ ID NO: 71945
  Clone ID: UC-GMROPIC104G08_FLI.pep

SEQ ID NO: 71987 - protein, 224 aa, Glycine max
  Clone ID: 701055573_FLI.pep
NVEDRTYMSTLFGHQSEILSIDCLRKERVLTAGRDRSMQLFKVHEESRLVFRAPASSLECCCFVSNDELLSGSDDGSIELWTVMRKKPIYILRNAHALLVDSMKSDQKDSEKLPNGNLENGYNHPENHHCLSVFSWVSAVSVCRNSDLAASGAGNGSVRLWEIESDTKDIKSLYNVPLAGFVNSLAFAKSGEFLVAGVGQEPRLGRWGRNPEARNGVSILTYEM

SEQ ID NO: 71988 - protein, 353 aa, Glycine max
  Clone ID: 701106478_FLI.pep
HKTLKPLSTFNAAVVCYWFGLMEMEGEKQHKFDVDLGNLMAFDSYHTFPSQPSLSREDLIKQCLLKGTHLVQAIADALFILPSTEDLDGPLVTLPPPLTKLPREKHLPKPKPPTKWEAFAKKKGIQKRKKDKIVYDEQSGTWKRRHGYDRANDEAAIPIIEAKPTDDPEEDPFAKRKENKKNRIEKQEKNRLQNLKEAAKFGALPSHIQLAATALPITGTQAAPKKVTKDELGNVAGIAATATASGGKFDKKLAGEKPQKHEGKYRKFLPVVEGTGIGSLEREQTEKILNKIISKNSHNILNVEKAVTMHNVKKEKKRRSEKGKTSATTDKKLKTQKKSFKKGSSKKGKAKGK

SEQ ID NO: 71989 - protein, 282 aa, Glycine max
  Clone ID: 701150049_FLI.pep
KKIKSRCCYDVASKLSHTANKYGRHTFTASRKEETYRMRASNSSSSISIAKRYFFFFLLFIFFALRSSSGDCSEYHHHHSPMATIGGLHDSQGSQNSVETEALARFAVDEHNKKQNSLLEFARVVRAQEQVVAGTLHHLTLEAIEAGEKKLYEAKVWVKPWLNFKELQEFKPAGDAPSFTSADLGVKKDGHQPGWQSVPTHDPQVQDAANHAIKTIQQRSNSLVPYELHEVADAKAEVIDDFAKFNLLLKVKRGQKEEKFKVEVHKNNQGGFHLNQMEQDHS

SEQ ID NO: 71990 - protein, 261 aa, Glycine max; identical to SEQ ID NO: 54670
  Clone ID: 701214019_FLI.pep

SEQ ID NO: 71991 - protein, 273 aa, Glycine max; identical to SEQ ID NO: 44461
  Clone ID: 701139475_FLI.pep

SEQ ID NO: 71992 - protein, 423 aa, Glycine max; identical to SEQ ID NO: 43754
  Clone ID: 701204592_FLI.pep

SEQ ID NO: 71993 - protein, 423 aa, Glycine max; identical to SEQ ID NO: 43754
  Clone ID: 701207680_FLI.pep

SEQ ID NO: 71994 - protein, 423 aa, Glycine max; identical to SEQ ID NO: 43754
  Clone ID: 701208091_FLI.pep

SEQ ID NO: 71995 - protein, 489 aa, Glycine max; identical to SEQ ID NO: 43983
  Clone ID: 700760432_FLI.pep

SEQ ID NO: 71996 - protein, 170 aa, Glycine max; identical to SEQ ID NO: 42236
  Clone ID: UC-GMFLMINSOY098D02_FLI.pep

SEQ ID NO: 71997 - protein, 405 aa, Zea mays
  Clone ID: 700236227_FLI.pep
TSESVAIKVIDKDKIKKCGLMDQIIQEISVMKLVKHPNIVQLYEVMATKTKIYFVIEYVKGGELFKKVQRGRLKEDVARAYFQQLISAVDFCHTRQVYHRDLKPENLLLDGSRNLKISDFGLSALPNCKRKDGLLHTICGTPAYVAPEVISQKGYDGAKADIWACGVILYVLLAGYLPFQDKNMMDMYKKIFKAELKWPSWFSSDVRKLLRRILHPNPNRRISIEEIRTHPWFRIGLDARLFDSTTRDYVPSDMDLALNSLNSNMVECNSAAEKLTILNAFDIISLSNGFDLSGIFENSNKVSKFTSTNTAMTIITKLMEVAKSLDLKVITKTGGLLNMEAAESGIKGVMSINAEIFQITPNYHLVEIKKINGDILEYHNFMNQSMRPALEDIVWAWHGEQPDEK

SEQ ID NO: 71998 - protein, 308 aa, Zea mays
  Clone ID: 700208764_FLI.pep
ENKLDQLQFARQKLTYCYLSAAATVFSSELSDARISWAKNGVLTTVVDDFFDVGGSKEELENLIALVEKWHAHHAVEFYSEQVKIVFSAIYTTVNHLGAMASAAQGRDLTNHLVEIWLDLLRSMMVEAEWQRCQYVPTVEEYMTNAVVSFALGPIVLPALYFVGQELLEHAVKDEEYDKLFRLVSTCGRLLNDYQSLEREGNQGKLNSVSLLVLHSGGSMSIEAAKKAMQKSIDVSRRDLLRLVLRKESAVPRPCKELFWKMCKILHLFYSQNDGFSSPKEMVSAVNAVINEPLKVQNSTTFLSSSSR

SEQ ID NO: 71999 - protein, 106 aa, Zea mays; identical to SEQ ID NO: 69842
  Clone ID: 700202091_FLI.pep

SEQ ID NO: 72000 - protein, 120 aa, Zea mays
  Clone ID: 700342353_FLI.pep
LDKIQIQEKTVPSKILKKTHTLCVATLEQVLQLSVILLSSELVLGIEHGHHLVPAKFPPMHPRLCFGRALDICIFQKHLSNTSNWSIAGVRSWNYNFHQVTIFASFFPHVLHNVIVFLIV

SEQ ID NO: 72001 - protein, 270 aa, Zea mays
  Clone ID: 700377448_FLI.pep
VRPPPPARKQAQTLTAGDASTMARYDRAITVFSPDGHLFQVEYALEAVRKGNAAVGVRGTDTVVLGVEKKSTPKLQDSRSVRKIACLDTHIALACAGLKADARVLINRARVECQSHRLTVEDPVTVEYITRYIAGLQQKYTQSGGVRPFGLSTLIVGFDPYTDKPALYQTDPSGTFSAWKANATGRNSNSMREFLEKNYKETSGKETIKLAIRALLEVVESGGKNIEVAVMTKKDGLRELEEAEIDEYVAEIEAEKAAAEAAKKGGPRDT

SEQ ID NO: 72002 - protein, 303 aa, Zea mays
  Clone ID: 701161321_FLI.pep
ILCPSAEIVASVVQNGVRGLMLDMYDFRNDVWLCHSYGGICQNFTAFQPAVNVLREVERFLSRNPAEVVTIFVEDYVESPMGLTRVLNASGLARYVLPAWRMPKSGGDWPLLSDMVRDNHRLLVFTSKAAKEAAEGVAYEWRYVVENQYGTKGMVKGTCHNRAESAAMNDLSRSLVLVNYFRDLPNLPAACKDNSAQLLDMVTACHDKSGDRWPNFIAVDFYKRSDRGGAAEATDKANGGLVCGCGSISACNANGTCTPRHGRTPRGIFNASSDAAAWRPPPPVLQWQRLILLPSLLALLLGL

SEQ ID NO: 72003 - protein, 353 aa, Zea mays
  Clone ID: 700804137_FLI.pep
ICVCCFADELIKNAAYIGTPGKGILAADESTGTIGKRLSSINVENVEENRRALRELLFCCPGALQYISGVILFEETLYQKTKDGKPFVDVLKEGGVLPGIKVDKGTIEVVGTDKETTTQGHDDLGKRCAKYYEAGARFAKWRAVLKIGPNEPSQLAIDLNAQGLARYAIICQENGLVPIVEPEILVDGPHDIDRCAYVTETVLAACYKALNEHHVLLEGTLLKPNMVTPGSDSKKVTPEVIAQYTVRTLQRTVPAAVPAVVFLSGGQSEEEATLNLNAMNKLSTKKPWALSFSFGRALQASTLKAWAGKVENVEKARAAFLARCKANSEATLGTYKGDAAADTESLHVKDYKY

SEQ ID NO: 72004 - protein, 191 aa, Glycine max; identical to SEQ ID NO: 71935
  Clone ID: 701007625_FLI.pep

SEQ ID NO: 72005 - protein, 304 aa, Zea mays
  Clone ID: UC-ZMFLB73143A09_FLI.pep
NSALAGEEAEKASFGFFDRNEKYVECLLSVNRKVNADGVVTGVFCFIHVPSDDLQHALHVQQASEQTAQRKLKAFSYMRHAINKPLSGMLYSRETLKSTGLNEEQMRQVRVGDNCHRQLNKILADLDQDNITDKSSCLDLDMAEFVLQDVVVSAVSQVLIGCQAKGIRVACNLPERSMKQKVYGDGIRLQQIVSDFLFVSVKFSPAGGSVDISSKLTKNSIGENLHLIDFELRIKHRGAGVPAEILSQMYEEDNKEQSEEGFSLAVSRNLLRLMNGDIRHLREAGMSTFILTAELAAAPSAVGR

SEQ ID NO: 72006 - protein, 160 aa, Zea mays
  Clone ID: UC-ZMFLB73200H02_FLI.pep
IIVVLSLGISALIAAQLSPPPKLMAGGKNTRAPASEHLSEWCTVSSPATSSRGKRRRTKKKKKNEGTASLPPLWLQHRPFSRNLTNWNRLIRASRPPPAATTMARHAAASCLTPSRARAHCRSSAPMKPSRSASKTAKAPRTSAKLGSSASKSADTSSRP

SEQ ID NO: 72007 - protein, 86 aa, Zea mays
  Clone ID: UC-ZMFLB73238H12_FLI.pep
VSKKINEFVRFQLLLFPAFYLVILVAAVACMLSWTRRIPDLRIKNVCSGIQYLVLYYPGGRLHPVDMGDKRASGKSSSSRLLLSFA

SEQ ID NO: 72008 - protein, 368 aa, Zea mays; identical to SEQ ID NO: 46496
  Clone ID: UC-ZMFLMO17050D11_FLI.pep

SEQ ID NO: 72009 - protein, 359 aa, Zea mays
  Clone ID: UC-ZMFLMO17045A02_FLI.pep
LAELSGTKREHFFLCHPCLLRLTSYHHLSPLLWQHRPAAEAASVDEVGDPPDVGATGSGSWVAGNSALPAEPLEHLGAEGPPGLHPLHGLLVAAAEADVKRLQVGHVAGGGGGGKGCRRGPRGGGQAVEPARRGRPVGSRGRRVAAPPAGRGRTGRAEAELAERGQDVVDGGPGARPGPAAEGGGGPVRRQRRRLRRGRLGRRQERAGRRRGHDALGEVALERLATQRGAVVGLGQRAGAPGAGARLLRRGREHPQLVRGVREEADAAAAGRAVLAGLGAVARRVEPALEDAVREVAGVAAPAPALAEVRAGGARVVVPARVAPPRLLPRVREGALGPVVAARAGATPDLELVHAELVA

SEQ ID NO: 72010 - protein, 359 aa, Zea mays; identical to SEQ ID NO: 72009
  Clone ID: UC-ZMFLMO17045B02_FLI.pep

SEQ ID NO: 72011 - protein, 368 aa, Zea mays; identical to SEQ ID NO: 46496
  Clone ID: UC-ZMFLMO17087G08_FLI.pep

SEQ ID NO: 72012 - protein, 941 aa, Zea mays
  Clone ID: UC-ZMFLMO17067C11_FLI.pep
QQQQQKWRTVLCGGGGCERGGTCKPTSMAAAFSAAILFHLLLLLFSPSAAQPGFISLDCGGARDHTDAIGIQWTSDASFVSGGQAAQLLVQNGLQQTQQQLTTVRYFPADNRKHCYTMNVRNRTRYLVRATFLYGNFDNSNVYPKFDISLGASPWSTIVVDDATTPVVEEAIILAAAPTLSVCLSNASTGQPFISTLELRQFNGSLYYTTDETRFFLGLSARINFGAGSNDSVRYPDDPFDRIWESDSVRRANYLVDVAPGTERISTTKPIFVGTNEEPPEKVMQTAVVGQDGSLNYRLDLEGFPANAWGVSYFAEIEDLAPNETRKFKLEVPGMPALSKPTVDVEENAQGKYRLYEPGYTNLSLPFVFSFGFRKTNDSSKGPILNALEIYKYVQITMGSQDANIMASMVSRYPQESWAQEGGDPCLPASWSWVQCSSETSPRIFSITLSGKNITGSIPVELTKLSGLVELRLDGNSFSGQIPDFRECGNLQYIHLENNQLTGELPSSLGDLPNLKELYVQNNKLSGQVPKALFKRSIILNFSGNSGLHIVSNGISHTIIIICVVIGAVVLLGVAIGCYFITCRRKNKSHEDTVVIAAAPAKKLGSYFSEVATESAHRFSLSEIENATDKFERRIGSGGFGIVYYGKLADGREIAVKLLTNDSYQGIREFLNEVTLLSRIHHRHLVTFLGYSQQDGKNILVYEFMHNGTLKEHLRGADNEKITSWLKRLEIAEDSAKGIEYLHTGCSPTIIHRDLKSSNILLDKNMRAKVADFGLSKPAVDGSHVSSIVRGTVGYLDPEYYISQQLTEKSDIYSFGVILLELISGHEPISNDNFGLNCRNIVAWARSHIESGNIHAIIDESLDRGCYDLQSVWKIAEVAIMCVKPKGAQRPPISEVLKEIQDAIAMERVLVSNCSNRMGSGSVEQNGGASFDELLMQPGLR

SEQ ID NO: 72013 - protein, 649 aa, Zea mays
  Clone ID: UC-ZMFLMO17100C10_FLI.pep
KILNALDLRKDFFFSYSYHIMRSLQKNLADPQDGWTLYETIFVWNEYLTRRIRNCLRNTLWTVALVHGFFKQDKFSISGKDIMLTLIARRSRHYAGTRYLKRGVNEKGRVANDVETEQIVYEAVPGPTEVSSVVQNRGSIPLFWSQETSKLNLKPDIILHEMQNNYEATELHFENLRARYGNPIIILNLIKTRERRESILRREFDKAIKIINKSLSEENHLRFLHWDLHQNSQGKPTNVLDVLLKVAFRALNLTEFFYCQVAPSSETSAQCPTLLNGLDQYLCDDNNSDDTECTEIVGDVSQEDISGSSDSSGNATTEDKFENSGLPPPKPPKFQKGVLRTNCIDCLDRTNVAQYAHGLAALGHQLHALGFIESPELGLEAPLAHHLMHFYEMMGDTLAVQYSGSAAHNKVFSAKRGHLKLFIQSQEFFRTLQRHYSNTCIDANKQAAINLFLGYFQPQQEKPALWELESSAGKHNNNLFDGHPSTLKRVKSDGTILHESNASISGSGRCHNEPLSASQPDVQNGFQFPTSESDSLHENEISSACGSGVAHLRYTPTASDVLHVPRAKVEYCHDSGDSNFLDLEWLSTSGNSSDERSIATSTPDANLSNENVISGITPDIMENHLAEMQYQKLPRNFVQWVNHGDTFWY

SEQ ID NO: 72014 - protein, 530 aa, Zea mays; identical to SEQ ID NO: 64221
  Clone ID: UC-ZMFLMO17097G09_FLI.pep

SEQ ID NO: 72015 - protein, 238 aa, Zea mays
  Clone ID: UC-ZMFLMO17270H06_FLI.pep
ATAPLASSPTTSADTERRKHELLRAVQETRRGFAAGPDQRAAIEEAVVAVEERGAGKGTPIDLAALDGTWRLCYTSASDVLVLFEAAERLPLLQVGQIYQKFECKDRSDGGTVRNVVRWSIENLLEEQEGATLMVSAKFVVLSKRNIFLQFEEVAVENIKISEQLQTLIAPAILPRSFLSLQILQFLKTFRTQVPVSGPERRSPGGLYYLSYLDRDMLLGRSVGGGGIFVFTKAQPLT

SEQ ID NO: 72016 - protein, 229 aa, Zea mays; identical to SEQ ID NO: 58773
  Clone ID: 700807171_FLI.pep

SEQ ID NO: 72017 - protein, 229 aa, Zea mays; identical to SEQ ID NO: 58773
  Clone ID: 700807354_FLI.pep

SEQ ID NO: 72018 - protein, 384 aa, Zea mays
  Clone ID: UC-ZMFLB73135E03_FLI.pep
SISLCSRRRRRLEWLPDPSRRRSRDKPLPAAMADAVGALPPPPLPPPPECESGRSSPSHAASPEFEFWMVGRNPSPALLTADELFSGGVVLPLHTLQAPGAPDGDGAPQPQADADADADAAALPLPDAQAQVEGEAAQPLAESAIAPTPDLPAVTFKWKDIFKAGAGAGAEGKERKKVERRVSSVSGNAELININIWPFSRSRSAGAGAGTLSRAKPNPNPNPNPNPNAAVAASGGASVNANTTANATAPSAPPAPAPVPRKVSSAPCSRSNSRGESSGPVPTIPTATATAAPEAAAGEEDADAATQVQAAPLTAAGTSSATSMLRRWVPGQGRNNNNAAGPGGIRVGRPSAVWKLRRNKLQQTAAEQKQVGGKKKAAPAQEPA

SEQ ID NO: 72019 - protein, 304 aa, Zea mays
  Clone ID: UC-ZMFLMO17294G04_FLI.pep
LRKWLQDHPRFVMNPLYIAGDSYSGLIIPTLALEIDRSIELGEKIFSGLKGYIAGNPLTGGQFDTDSQIPYFHAMGLVSDELYKNARENCGGKYSAPLNAVCAEAVQAINNCTRDINKQYILDPACPDDDLLSPKTVAETDGTSRLMLESADFLLDSKCAEALYILSYAWGNDDTVQESLGIRKGTIGAWKRYSHALPYNYDIQSAVDYHSRLATKGYRALIYSGDHDAVVPHVGTQAWIRYLNLTIVDDWRPWYVGDQVAGFTRSYASGLTFATVKGAGHVAPLYKTLECQKMFITWISGNPL

SEQ ID NO: 72020 - protein, 196 aa, Zea mays
  Clone ID: UC-ZMFLMO17072H05_FLI.pep
VEPKNFSSYGGRRGNNEVVMRGAFANMRIVNKLLNGEAGPWTIHVPTGEKLYVYDAAMKYKSEGHDMVIIAGSEYGSGSSRDSAAKGPMLLGVKSVIAKSFERIHRSNLVGMGIIPLCFQAGEDADSLGLTGRERYTIHLPTSTAEISPGQDVTVTTHDGRSFTCTLRLDTQLEVTYFNHGGILPYMVRNLAAQMK

SEQ ID NO: 72021 - protein, 196 aa, Zea mays; identical to SEQ ID NO: 72020
  Clone ID: UC-ZMFLMO17072H06_FLI.pep

SEQ ID NO: 72022 - protein, 289 aa, Zea mays
  Clone ID: 700094481_FLI.pep
HTQSHTHRPPSLVLGSPCYLAFTDLPLPNRTVTSRRPGAVVLRLVAARRWWRAADRIEQRMDGGGGLGGLRWTAEEASTIGGIATVSLLHSFIPTHWLPFSIVARAQRWPLSRTLLVTAFGGVLHVVSTALLGITAVTMANTIAGEETVHKLASLLLIFLGASYILLFALGKGGHSHAHNHPMEKMAVAGLVLVPALSPCATTLPVFLAVGNSSSMMILAIIVLLFSTITVMTSLVALSFYGASQIKFHWVERYDKILVGTVLCLVGVLTYVFHHHDGDEHVHQKLVSP

SEQ ID NO: 72023 - protein, 163 aa, Zea mays
  Clone ID: 701177490_FLI.pep
NAVRPTSLSSRTDDDGKRMMRGVGGPLLTIGDLLSDLAVDDPLVGVGDASVPSSPSAAQQAGKANPSDLSRLFEEHYDDLMKALQEKDPSWPSLMLKLCATLKTADRLMSCADTNAEQLLEKVKALEGVLDRSGHAVAEIVEALQRLGLANDGHGSQSKSASK

SEQ ID NO: 72024 - protein, 89 aa, Zea mays
  Clone ID: 700097070_FLI.pep
WKQRKFKLDGNLLVQVLICQIQQFGFVHHELIMYDEGSARPTFFKERTQSEELPFHWSPGGTTRNDFTIDDSVLRRKPNAMVRLRCWIR

SEQ ID NO: 72025 - protein, 274 aa, Glycine max; identical to SEQ ID NO: 42938
  Clone ID: 701060963_FLI.pep

SEQ ID NO: 72026 - protein, 460 aa, Glycine max; identical to SEQ ID NO: 43986
  Clone ID: 700682328_FLI.pep

SEQ ID NO: 72027 - protein, 395 aa, Glycine max; identical to SEQ ID NO: 38715
  Clone ID: 701133316_FLI.pep

SEQ ID NO: 72028 - protein, 649 aa, Zea mays; identical to SEQ ID NO: 72013
  Clone ID: UC-ZMFLMO17100C09_FLI.pep

SEQ ID NO: 72029 - protein, 386 aa, Zea mays
  Clone ID: LIB3245-328-E3_FLI.pep
STTPHRTAAQLFSSPIPMDMGSGSSPVITDPISISPPLLGGLTSNLMPFSVMSGGCSSSPSMSNSSRRKIEEVLVNGLLDAMKSSSPRKKHNLAFGQDNSPDEDPAYTAWLSKCPSALASFKHIVANAKGRRIAVFLDYDGTLSPIVDDPDKAFMSPVMRAAVRNVAKYFPTAIVSGRSRKKVFEFVKLTELYYAGSHGMDIVTSAAAHATEKCKEANLFQPACEFLPMINEVSKCLVEVTSSIEGARVENNKFCVSVHYRNVAEKDWKVVAGLVKQVLEAFPRLKVTNGRMVLEVRPVIDWDKGKAVEFLLRSLGLSDSEDVVPIYIGDDRTDEDAFKVLRERSCGYGILVSQVPKDTEAFYSLRDPSEVMGFLNSLVRWKKHPL

SEQ ID NO: 72030 - protein, 222 aa, Glycine max; identical to SEQ ID NO: 56921
  Clone ID: UC-GMFLMINSOY099C12_FLI.pep

SEQ ID NO: 72031 - protein, 481 aa, Zea mays
  Clone ID: LIB3137-015-H12_FLI.pep
KQVFPPVSKMDPAIYGPPESSITEAHITGQLNGLTVQQAVDEAKLFILDYHDVYLPFLDRINAIEGRKAYATRTILFLTKAGTLKPIAIELSLPPSKAGEPRPSKVLTPPADATSNWLWMLAKAHVSSNDAGVHQLVNHWLRTHAVMEPFILAAHRRMSAMHPVFKLLHPHMRYTLEINALARQSLISADGVIESCFTPGPVSFEISAAYYRDHWRFDLEGLPSDLVRRRVAVEDASQPHGIRLLIEDYPYANDGLLLWSAIRSWVESYVQLYYPDAGTVQSDDELQGWYHETVHVGHADIRHATWWPSLSTPGDLASILTTLIWLASAQHAALNFGQYPLGGYVPNRPPLMRRLLPDPERDAAEYATFMADPHRFFLNAMPGVLEATKFMAVVDTLSTHSPDEEYLGEERDEPWTGDAAAVAAHDMFTADVRRAEEAIDSRNADQLRKNRCGAGVLPYELLAPSSPPGVTCRGVPNSISI

SEQ ID NO: 72032 - protein, 438 aa, Zea mays
  Clone ID: LIB3245-211-F1_FLI.pep
CFVPPPYRTKQIKSEMASRSSSAEGAGRTLPVNLKLITVLSIDGGGIRGIIPATILAFLEAKLQELDGPDARIADYFDVVAGTSTGGLLTAMLTAPDTNERPLFAAKDLARFYIQHSPKIFRQKNAMGSKLVGKLRMACGPKYDGKYLHAQLRRLLGNMRLDRTLTNVVIPTFDIAYMQPMIFSSFELKHRPSTNALLSDICMSTSAAPTYFPPHYFQTRDENGRRKAFNLVDGGIAANNPTLCAMGQVSKDIILADDDFFPVMPADYGKFMVISLGCGSNRNRRYCAKAAARWGVFSWLFKDGSAPIIDMFNSASADMVDIHLCVLFRALRSSENYLRIQYDQLTGSAGSIDDSSRKNMDRLVRIGNKLLDMNVSRVDMETGRNVEVPGAGTNAERLAKFARQLSDERRRRSQNELIMNSEQVFQIQHQAWYYGGDA

SEQ ID NO: 72033 - protein, 433 aa, Zea mays
  Clone ID: LIB3245-023-A12_FLI.pep
RGVTHHTSFAIAMENNYACPPPSKGNLITVLSIDGGGVKGVIPATFLAFLESKLQELDGSSARIANYFDVIAGTSTGGLIAAMLAAPSLSNAKQPCYEAKDIVPFYLEHSPRIFPCRTGILGWFFKILQTVKVMIRPKYDGKYLHKVTSDLLGGTRVEETLTNVVIPTFDVKCVKPTIFSTFKARSSALMNARLADVCIGTSAAPTVLPAHYFETVDHRTGASRSFNVIDGGLAANNPTLVAMGEITEQMRQKSKEFPETKPLDYHRYLVVSLGTGLPEQDIKFDACRVAKWGIFGWLGRRENTVPLLQMFMHASSDMTDSYVADLFKAIGCSDQLLLRVQDRNIPIAAVAADLSTEKNLRGLVKIAENLLHKPLGEDDYKTDDRVETTPRDGRAILTYAGMLARFAKLLSDERKLRLQNMGHCMPVIANREA

SEQ ID NO: 72034 - protein, 433 aa, Zea mays; identical to SEQ ID NO: 72033
  Clone ID: LIB3245-225-E3_FLI.pep

SEQ ID NO: 72035 - protein, 438 aa, Zea mays; identical to SEQ ID NO: 72032
  Clone ID: LIB3245-212-F1_FLI.pep

SEQ ID NO: 72036 - protein, 132 aa, Zea mays
  Clone ID: 701183357_FLI.pep
AMHQSIYTAAPHMERKHGIFTTAPYYHRVRGIPCTRWHGRISPLPSGTLTRHDTTNNMYRHLVFAKVCTRRPALARRHLLHSYRSLWERWRSYHSGRTLIRLGRATSRSLSISLAVTLQDSRDRERRFCSGF

SEQ ID NO: 72037 - protein, 269 aa, Zea mays; identical to SEQ ID NO: 52067
  Clone ID: LIB3354-075-C4_FLI.pep

SEQ ID NO: 72038 - protein, 269 aa, Zea mays; identical to SEQ ID NO: 52067
  Clone ID: LIB3958-009-A12_FLI.pep

SEQ ID NO: 72039 - protein, 245 aa, Zea mays
  Clone ID: LIB4149-001-A1_FLI.pep
AEHPSMADAGNEAEGLTLLGLHVSPFALRVRMALSLKGLSYEYIEQDLFHKGELLLSSNPVHKKVPVLIHHGKPICESLAVVEYVDEVWPGAAATILPADPHGRATARFWAAYIDGKLFPAWTGIMKAATEEARADKLRETHAAVLNLEKAFAEISSSSSNDGAAFFGGDSVGYLDLALGCSLPWFGALRAMLGVEIIDAAQAPLLVAWAERFGETPVAKEVLPQPDEAVAYAKKIQAYWASAKN

SEQ ID NO: 72040 - protein, 216 aa, Zea mays; identical to SEQ ID NO: 53440
  Clone ID: JC-ZMXLIB3526090CG03_FLI.pep

SEQ ID NO: 72041 - protein, 243 aa, Glycine max
  Clone ID: 700725572_FLI.pep
EGVDIMLIRELTGGIYFGEPRGFGTNDNGEEIGFNTEIYATHEIDRIAHFAFKVAQKRRRKLCSVDKANVLEASMLWRKRFLAIAQEYPDVELSHMYVDNASMQLIRDPKQFDTMVTNNIFGDILSDEASMVTGSIGMLPSASLGASGPGLFEPIHGSAPDIAGQDKANPFATVLSAAMLLRYGLGEEKAAERIENAVMDTLNRGFRTGDIYSAGTKLVGCKQLGEEILKSVESNVPAGAAAV

SEQ ID NO: 72042 - protein, 232 aa, Glycine max
  Clone ID: 700726414_FLI.pep
VNGQILGAAEFDNTFGWDNKHAGARILLSKEFLVQRVQSLHDYKGHADNFVCSLISGTSLSSTQYTPGGLLFKMSDSNMQYVTSTSFLLLTYAKYLTQSHMLVNCGGITVTPRRLRTIAKKQVDYLLGDNPLKMSYMVGYGPRYPRRIHHRGSSLPSIAVHPGKIQCSAGFSVMNSQSPNPNILVGAIVGGPDRHDRFPDQRSDYEQSEPATYINSPLVGALAYLAHSFGQL

SEQ ID NO: 72043 - protein, 231 aa, Glycine max
  Clone ID: 700728493_FLI.pep
KSPTPSTIYYKILCHKRKMWLLLATKSYTTINYQNKNLVYIQAHGTFVCGKNGGGVAEEFNCEKDVDICIGTLSKAAGCHGGFIACSKKWKLLIQSRGRSFIFSTAALVPVAAAGHAAVKVAKLEKWRREAIWNRVKDFHLLTGIPVTSHIISLVVGSEDKALQASRHLLQSGFHVTAIRPPTVPPNSCRLRVTLSAVHTREDLENLAAALSRCINFQDTRIYDSNAYARL

SEQ ID NO: 72044 - protein, 239 aa, Glycine max
  Clone ID: 700730112_FLI.pep
SHVQSAEQHNQDVNSLGLISSRKTHEAIEILKLMSSTFLIALCQAIDLRHLEENLKNTVKNVVSQVAKRTLTTGVNGELHPSRFCEKDLLKVVDREYTFAYIDDPCSGTYPLMQKLRQVLVDYALANGENEKNTNTSIFQKIATFEEELKTLLPKEVEGARVAYENDQCAIPNKIKECRSYPLYKFVREELGTALLTGERVVSPGEECDKVFTAMCQGKIIDPLLECLGEWNGAPLPIC

SEQ ID NO: 72045 - protein, 166 aa, Zea mays; identical to SEQ ID NO: 61417
  Clone ID: LIB84-013-C12_FLI.pep

SEQ ID NO: 72046 - protein, 208 aa, Zea mays
  Clone ID: LIB36-015-E4_FLI.pep
LIDPFFMAHNNRRCSPRSQTASRIRIFLARRRPYDSGPAKTFIRARARRHPQSLTLTELLLQQLRRVAMRLNWKRRWAYEAAAGGAAFSSAWASETRPRLRSSCCCCCSRLACPAPSPQNRSRRARGPWISRASWVRSLRTSSPRMPLPPWTPTTWLHHSPPSLLPLVLLLLLSRSSAASLRRSPQVRVQGGEERPEGRGGSRRVLLC

SEQ ID NO: 72047 - protein, 242 aa, Zea mays; identical to SEQ ID NO: 42244
  Clone ID: LIB3245-507-B11_FLI.pep

SEQ ID NO: 72048 - protein, 268 aa, Zea mays
  Clone ID: LIB3354-119-A7_FLI.pep
IYYSWFVFIYSLAQHNILSQEAHRTAQSTDEDQETLNSTRTHQTYQSRATTQHTHTSRVAETQDPTPRRERDATIHLPSMSSSAGDLDALHLGLLDLGLGHGDREHAVLQRGPHLLRLGVLRQAEAPHELAAAALHAVPLVALVLLLPAALPADEQHVAVLHLHLDLLFLHAGEVGLEHVRLGRLLPVDAGAGEGGGLGARRRRRRHDGAEHAVERVEEVHGEWVEHAAAPHQRHFCFVASGLVRASANCGSRAVSCGLEDFSARSLL

SEQ ID NO: 72049 - protein, 318 aa, Zea mays
  Clone ID: LIB143-050-H1_FLI.pep
WLRALFRRQSAGSTPAAACPSSPHPMRALARAASLLRRASGSAPTTASLYHPPRNVGPCLVKNLPGFFFNGYSTLLAPPNEVLIPPELLSSRTVWTPDRELGQYEDLVARVTNFHNEDKGFMVLDGDVFDVPIRKDIVHRVVRWQLAKRQQGTHSTKTISEVSGTGRKPYPQKGTGKARHGTLRGAQFRGGATMHGPKPRSHAIKLQKKVRRLGLKIALSARTAEGKLLIFEDLEVPSHKTKNIVQYIRQMDDSKKVLLVDGGDIDKKLKLATQNLHYVNVLPSIGLNVYSILQHDTLVMTRAAINRIVERMHTPINR

SEQ ID NO: 72050 - protein, 181 aa, Zea mays
  Clone ID: LIB3600-031-C12_FLI.pep
QIAPPNPLLPPSRARPRSRARSVGHGAGVGGAGLRGGRGGDHAAAADAAGARRPAPGHDLRGAERAEAHDVGGALLPLPAHGHLLEVRDAPHLRRRARLHPLRAPPPPEVHHEVAAERAPHRRRAAPLLDPLLRHPARRQARADAAARRQAQEARRLMDPHPSGGLVLPLPALSSCFMLWC

SEQ ID NO: 72051 - protein, 91 aa, Zea mays
  Clone ID: LIB3600-048-A1_FLI.pep
GCISQTREAVETKHGVDPRRRSSCKDWKVARRAPAPQGNTCSVHPHEERTKVPWESEGRYRFSQRSWSQTVVIAMLKTLDLAFVQWLSCNF

SEQ ID NO: 72052 - protein, 179 aa, Zea mays; identical to SEQ ID NO: 38879
  Clone ID: LIB3600-059-G6_FLI.pep

SEQ ID NO: 72053 - protein, 165 aa, Zea mays
  Clone ID: LIB36-008-A5_FLI.pep
SGGGGGSGAHKAASGSAPSPAPNPTAMLSALMSKRAKLQEELRSIERQVYDMETTYLQETNQFGSVLKGFESFLSSSKNTSNLKRSRKFQADERLFSLSSVTSPAVDEHLAGRDDGREYGAGRSKGGSTPANGQGKPKKGGRPGGRDGKRLRPSNDPDLDDEDDY

SEQ ID NO: 72054 - protein, 124 aa, Zea mays
  Clone ID: LIB36-014-B8_FLI.pep
RDHAPAPLVSFFASSIAGFGGHGRRQRPEVQDGAREERREEQGRQRQPAGGQQEGHEHPVQDLHADLHLHHLRGQVQRTCGGEASQERPLPVLPPPQELVSSRSICSAQLKDKYYIYIYTLCVN

SEQ ID NO: 72055 - protein, 362 aa, Zea mays
  Clone ID: LIB3357-059-A8_FLI.pep
LRQMHKSYRSKRVRIHGYKQLSLTATTAGPRKSKRCERRRRSGGLRQSTMHARAREKLNDRRRAGRESWMLAAHPWVGRLRLLVVGGGELLVGVGDEEQLVDDAGEAAADEGPDPVHPLVAPLPADEGGAEGHGGVHGRAVEGAAHQDVGPHDEADGNGGDGAQAALLRVHRRGVHRVHQPEGHHDLQHQRLPHRHARQPEGARGLPARREAEQEARHGGPQQLRHPVQEPPEQGDVAAHEGAEGHGRVHVPAGDVRAHRHRHEQRERVRHRRRDQARRGRRAAAGQLAEGHAGALAGEDEDEGGDELSERRLEGARVVHLLVAPQGDPIDRHFHGPLASSRSGHDCDWSWSGGKLSSGGVG

SEQ ID NO: 72056 - protein, 287 aa, Zea mays; identical to SEQ ID NO: 58142
  Clone ID: LIB3587-228-H3_FLI.pep

SEQ ID NO: 72057 - protein, 180 aa, Zea mays; identical to SEQ ID NO: 52264
  Clone ID: LIB3591-113-C1_FLI.pep

SEQ ID NO: 72058 - protein, 402 aa, Zea mays; identical to SEQ ID NO: 41873
  Clone ID: LIB3137-060-B1_FLI.pep

SEQ ID NO: 72059 - protein, 372 aa, Zea mays; identical to SEQ ID NO: 53454
  Clone ID: LIB3245-358-A7_FLI.pep

SEQ ID NO: 72060 - protein, 290 aa, Zea mays; identical to SEQ ID NO: 42265
  Clone ID: JC-ZMXLIB3527P006DE07_FLI.pep

SEQ ID NO: 72061 - protein, 521 aa, Zea mays
  Clone ID: LIB3245-343-F11_FLI.pep
LARRKKKEGQGTRWLRDMVLTHVHDLDEASAASAVVFASRYVQDPLPRYELGEKSVSKDAAYQIIHDELLLDSSPRLNLASFVTTWMEPECDKLILEGINKNYADMDEYPVTTELQNRCVNIIARLFHAPVGASEKAVGVGTVGSSEAIMLAGLAFKRRWQNRRRAAGQPCDRPNIVTGANVQVCWEKFARYFEVELKEVRLREGCYVMDPDEAVRMVDDNTICVAAILGSTLTGEFEDVRRLNDLLAANNRRTGWDTPIHVDAASGGFIAPFLYPDLEWDFRLPLVKSINVSGHKYGLVYAGVGWVVWRSKEDLPDELIFHINYLGADQPTFTLNFSKGSSQIIAQYYQFLRLGFEGYRNVMENCMESARTLREGLERTGRFTIISKEQGVPLVAFTFKAKDETPLAFKLSAELRRFGWIVPAYTMPANLEHMAVLRVVVREDFGRPLAERFLSHVRMALEELDHAAKGGPVPRMRLTIELGPPARGSGEEASARVVNREAVVPVHRSVSLAGGKTKGVC

SEQ ID NO: 72062 - protein, 389 aa, Zea mays; identical to SEQ ID NO: 47824
  Clone ID: 700258840_FLI.pep

SEQ ID NO: 72063 - protein, 478 aa, Zea mays
  Clone ID: LIB3245-439-F2_FLI.pep
SFCSERTHRPSPISDPLVDPKMQIFVKTLTGKTITLEVESSDTIDNVKAKIQDKEGIPPDQQRLIFAGKQLEDGRTLADYNIQKESTLHLVLRLRGGMQIFVKTLTGKTITLEVESSDTIDNVKAKIQDKEGIPPDQQRLIFAGKQLEDGRTLADYNIQKESTLHLVLRLRGGMQIFVKTLTGKTITLEVESSDTIDNVKAKIQDKEGIPPDQQRLIFAGKQLEDGRTLADYNIQKESTLHLVLRLRGGMQIFVKTLTGKTITLEVESSDTIDNVKAKIQDKEGIPPDQQRLIFAGKQLEDGRTLADYNIQKESTLHLVLRLRGGMQIFVKTLTGKTITLEVESSDTIDNVKVKIQDKEGIPPDQQRLIFAGKQLEDGRTLADYNIQKESTLHLVLRLRGGMQIFVKTLTGKTITLEVESSDTIDNVKAKIQDKEGIPPDQQRLIFAGKQLEDGRTLADYNIQKESTLHLVLRLRGGQ

SEQ ID NO: 72064 - protein, 131 aa, Zea mays; identical to SEQ ID NO: 53429
  Clone ID: 700624070_FLI.pep

SEQ ID NO: 72065 - protein, 478 aa, Zea mays; identical to SEQ ID NO: 72063
  Clone ID: 700570814_FLI.pep

SEQ ID NO: 72066 - protein, 196 aa, Zea mays; identical to SEQ ID NO: 41372
  Clone ID: 700157586_FLI.pep

SEQ ID NO: 72067 - protein, 521 aa, Zea mays; identical to SEQ ID NO: 72061
  Clone ID: 700085908_FLI.pep

SEQ ID NO: 72068 - protein, 335 aa, Zea mays; identical to SEQ ID NO: 53467
  Clone ID: 700218683_FLI.pep

SEQ ID NO: 72069 - protein, 147 aa, Zea mays
  Clone ID: 700465282_FLI.pep
KPRLAAMPDDVAVANFVEKDWSFLESAGANLQRALASGALSPASRVLALTPTASFVRSLLASSPCELLVAAHESMYVLAGVKEAHDEVRCFHLEGGGGGRGGGVVEAVPERFDDFDVVFVCYFPGMGVSAGALLKSLAKRCSKGETC

SEQ ID NO: 72070 - protein, 147 aa, Zea mays; identical to SEQ ID NO: 72069
  Clone ID: 700466147_FLI.pep

SEQ ID NO: 72071 - protein, 570 aa, Zea mays
  Clone ID: 700470404_FLI.pep
PAPSPASFPNLIFSPFARNAHTARSPISDPRSPRRSKMQIFVKTLTGKTITLEVESSDTIDNVKAKIQDKEGIPPDQQRLIFAGKQLEDGRTLADYNIQKESTLHLVLRLRGGMQIFVKTLTGKTITLEVESSDTIDNVKAKIQDKEGIPPDQQRLIFAGKQLEDGRTLADYNIQKESTLHLVLRLRGGMQIFVKTLTGKTITLEVESSDTIDNVKAKIQDKEGIPPDQQRLIFAGKQLEDGRTLADYNIQKESTLHLVLRLRGGMQIFVKTLTGKTITLEVESSDTIDNVKAKIQDKEGIPPDQQRLIFAGKQLEDGRTLADYNIQKESTLHLVLRLRGGMQIFVKTLTGKTITLEVESSDTIDNVKAKIQDKEGIPPDQQRLIFAGKQLEDGRTLADYNIQKESTLHLVLRLRGGMQIFVKTLTGKTITLEVESSDTIDNVKAKIQDKEGIPPDQQRLIFAGKQLEDGRTLADYNIQKESTLHLVLRLRGGMQIFVKTLTGKTITLEVESSDTIDNVKAKIQDKEGIPPDQQRLIFAGKQLEDGRTLADYNIQKESTLHLVLRLRGGQ

SEQ ID NO: 72072 - protein, 196 aa, Zea mays; identical to SEQ ID NO: 41372
  Clone ID: 700350978_FLI.pep

SEQ ID NO: 72073 - protein, 485 aa, Zea mays; identical to SEQ ID NO: 46975
  Clone ID: 700351460_FLI.pep

SEQ ID NO: 72074 - protein, 482 aa, Zea mays; identical to SEQ ID NO: 53414
  Clone ID: LIB3960-023-C11_FLI.pep

SEQ ID NO: 72075 - protein, 223 aa, Zea mays; identical to SEQ ID NO: 42285
  Clone ID: CC-ZMPO148044G08_FLI.pep

SEQ ID NO: 72076 - protein, 164 aa, Zea mays
  Clone ID: JC-ZMSHLIB3587P034H03_FLI.pep
GCSRSVHPGGFVRSKAASELEDAGQAVGRRGGRASPGDGPREAPQGHHRPPARHQQRRGRRQLQAGAVDAVDPDDAGDAVVVDDAARRRQRVAQRLPPGEQPGHQGHGRQPLRPAAAQLPHRLRLALQRRDQEQPPLDRARWMDSEEAMFAGPCGYLKRTHALL

SEQ ID NO: 72077 - protein, 299 aa, Zea mays; identical to SEQ ID NO: 53486
  Clone ID: JC-ZMXLIB3526P041AE11_FLI.pep

SEQ ID NO: 72078 - protein, 230 aa, Zea mays; identical to SEQ ID NO: 50035
  Clone ID: LIB3150-077-E5_FLI.pep

SEQ ID NO: 72079 - protein, 363 aa, Zea mays; identical to SEQ ID NO: 42242
  Clone ID: LIB3154-008-D11_FLI.pep

SEQ ID NO: 72080 - protein, 116 aa, Zea mays; identical to SEQ ID NO: 71941
  Clone ID: 701180880_FLI.pep

SEQ ID NO: 72081 - protein, 178 aa, Zea mays; identical to SEQ ID NO: 41250
  Clone ID: LIB3357-045-B6_FLI.pep

SEQ ID NO: 72082 - protein, 189 aa, Zea mays
  Clone ID: LIB3600-010-G2_FLI.pep
KATLPPSLLPRRLPAVAAMVKYSQEPGNPTKSAKAMGRDLRVHFKNTRETAFALRKLSLTKAKRYLEDVIAHKQAIPFRRYCGGVGRTAQAKSRHSNGQGRWPVKSARFILDLLKNAESNADVKGLDVDNLYVSHIQVNQAQKQRRRTYRAHGRINPYMSSPCHIELILSEKEEPVKKEADNIVAARKQ

SEQ ID NO: 72083 - protein, 280 aa, Zea mays; identical to SEQ ID NO: 46474
  Clone ID: LIB3608-054-C10_FLI.pep

SEQ ID NO: 72084 - protein, 244 aa, Zea mays
  Clone ID: LIB3689-247-A10_FLI.pep
FFDFSRRRCSSHIPREDACSSPIDTMAVFSDLHTADGLKSLEAHLAGKTYVSGDSITKDDIKVFAAVPSKPGAEFPNAARWYETVSAAVASRFPGKAVGVNLPAGSAPAAAAPADEAEDDDDLDLFGDETEEDKKAADERAAAAKASSKKKESGKSSVLMDVKPWDDETDMKKLEEAVRSVQMEGLTWGASKLVPVGYGIKKMTIMLTIVDDLVSIDTLIEDHLTQEPINEYVQSCDIVAFNKI

SEQ ID NO: 72085 - protein, 242 aa, Zea mays; identical to SEQ ID NO: 48244
  Clone ID: LIB3912-048-D6_FLI.pep

SEQ ID NO: 72086 - protein, 408 aa, Zea mays
  Clone ID: LIB4071-007-B3_FLI.pep
GAEMVAEAEVMHQSPVPVLEVQYHRRATTKGVDDVVGMSAPAPAEVGVGVGVEVEVEVEVAVEVPRMGLEQPDVAPSLSTDMIQQFVPNIRSGSFADIGPRRYMEDEHIRIDDLSAHLGSMLVCPLPSAFYGVFDGHGGPDAAAYMKRHAMRFLFEESEFPQASQVDEVYLESVESCVRRAFLQADLALADDLDISRSSGTTALTALVFGRQLVVANTGDCRAVLCRKGVAMEMSRDHRANHVEERERVAASGGYIEDGYLNGVLSVTRALGDWDMKAPGASASAALIAEPEFRRATLGEDDEFLVMGCDGIWDVMTSQHAVSLVRRGLRQHDDPARCARELVMEAKRLETADNLTVVVVCFAPEMGSPFTPQQQQEEELPARPRSCKKGLSTEALCSLRSWLDTDHR

SEQ ID NO: 72087 - protein, 410 aa, Zea mays
  Clone ID: LIB3060-080-F2_FLI.pep
LGSPGAGTSTIFKQAKLLYGNRFTDEELENIKLMIQSNMFKYLGILLEGRERFEEEALAVPNHPSSVGDDPQQDESKSSSSNSCIYSINAKLKKFSDWLLDIIATGDLDTFFPAATREYAPVVDELWKDPAIQATYKRKDELHFLPDAAEYFLSRAVEVSSNEYEPSEKDVIYAEGVTQGNGLAFIDFTLDDRSPMSESFGDNHDAYPQQPVNKYQLIRVSAKGMNEGCKWVEMFEDVSMVIFSVALSDYDQLGAPASGSSRTLVNKMIQSRDLFEATIRQPCFRDTPFLLLLNKYDAFEEKIGRSPLSSCEWFGDFCPLRTHHNSQSLAQQAFYYVAIKFKDLYAASTGRKLFVWQTRARDRPTVDEAFRYVREVLRWEDERGVAGYCPDESFYSTTELSSSRLIAAAQ

SEQ ID NO: 72088 - protein, 494 aa, Zea mays; identical to SEQ ID NO: 59774
  Clone ID: LIB3245-385-C4_FLI.pep

SEQ ID NO: 72089 - protein, 268 aa, Zea mays; identical to SEQ ID NO: 72048
  Clone ID: LIB3355-010-D6_FLI.pep

SEQ ID NO: 72090 - protein, 318 aa, Zea mays; identical to SEQ ID NO: 72049
  Clone ID: LIB3137-001-E2_FLI.pep

SEQ ID NO: 72091 - protein, 89 aa, Zea mays
  Clone ID: LIB3912-027-F4_FLI.pep
MTSGEMLAACWLSCSIFAVVSSSRRLTFAPESPLLSSSRIHNLLSLLLRSQQLLNPTLAPVGVHLSAPDLGRGGRSGGEDWGPNNRTNR

SEQ ID NO: 72092 - protein, 485 aa, Zea mays; identical to SEQ ID NO: 46975
  Clone ID: LIB3689-240-B3_FLI.pep

SEQ ID NO: 72093 - protein, 242 aa, Zea mays; identical to SEQ ID NO: 48244
  Clone ID: LIB3689-260-B2_FLI.pep

SEQ ID NO: 72094 - protein, 195 aa, Zea mays
  Clone ID: LIB3634-002-E8_FLI.pep
PLAVPPSKSLYPMPMPTPTRMDRKWTHHRMHAAIAAPQPARGYTQAQAKSSSRLFLLLGLGTLDLCRTTEGLLSVLALLALLSGGTLGLGGETNPHQSVLGLELLHGLGRVIDESEAGGLAATELGSETEDGDLVLLGLVERTELLTELLLGDVGTVGVEDVNDHLLAAQQRVADELASSEGDGGVVVRHFCRLS

SEQ ID NO: 72095 - protein, 608 aa, Zea mays; identical to SEQ ID NO: 59912
  Clone ID: LIB3632-007-C7_FLI.pep

SEQ ID NO: 72096 - protein, 288 aa, Zea mays; identical to SEQ ID NO: 47549
  Clone ID: LIB3632-015-A1_FLI.pep

SEQ ID NO: 72097 - protein, 179 aa, Zea mays; identical to SEQ ID NO: 38879
  Clone ID: LIB3632-018-D9_FLI.pep

SEQ ID NO: 72098 - protein, 280 aa, Zea mays; identical to SEQ ID NO: 46474
  Clone ID: LIB3632-058-B10_FLI.pep

SEQ ID NO: 72099 - protein, 485 aa, Zea mays; identical to SEQ ID NO: 46975
  Clone ID: LIB3608-011-E10_FLI.pep

SEQ ID NO: 72100 - protein, 178 aa, Zea mays; identical to SEQ ID NO: 41250
  Clone ID: LIB3608-027-H9_FLI.pep

SEQ ID NO: 72101 - protein, 280 aa, Zea mays; identical to SEQ ID NO: 46474
  Clone ID: LIB3608-051-C3_FLI.pep

SEQ ID NO: 72102 - protein, 237 aa, Zea mays
  Clone ID: LIB36-002-D12_FLI.pep
AIRSLDPSFPSKKRSAHGHGHASLRRHAPPAGRRLGAGGEAAAAELAARAAVVVLPRAGPAPRVHRGGGGGAQGVRGPAAGPQHAVPDLRRQHGRAAPQGAGGGVLRHHVDVPQGAGVRDAHRRRRHHAGGPQPLEAGAQGAVPGARHQVALQVQDHLPVLPRLPQRRGAVPPPQGRRLPGEGQPRQGGRRPELPQHRQERQPHRRQVHRQGHLRLITLHVRRTPQPGSKLKNFFFY

SEQ ID NO: 72103 - protein, 164 aa, Zea mays
  Clone ID: LIB36-010-E1_FLI.pep
LLCRRHRPFLRRTSASPRRGQKEVLHRARLSPQGHRHRRRGNGCQRPACRRCHGPGGAAGRRRRRARLRAQPVHRQGRRHHHIQEQRRLPAQRRLRRRRGAERRRRHQDLAGGVPQRARRDLLRHPHRAGNLRLLLRAASRSRNGRQDHRQLIKLAIDRYPFMY

SEQ ID NO: 72104 - protein, 110 aa, Zea mays
  Clone ID: LIB36-011-C12_FLI.pep
GGASENVASIQRHVKTKTKQNESMLHTVTVAASFNATTPGSSFPSNNSRLAPPPVEMWLITSATPTFSTAATESPPPMIVVTPLPLSSASFFATASVPTANLSNSKTPMG

SEQ ID NO: 72105 - protein, 327 aa, Zea mays
  Clone ID: LIB36-018-D2_FLI.pep
YCIHNTEHQKELRSDRHGCRHHGYHLPRAHRQAGGWHEGRLRRGPHHHAQDRRQAQAGGVRQPLVRCRPRPVPGPAVRLAPELPDRRVPRRLRVGHRGAVGGPGDLRQEPRAGGDPLPLGHARRARVRVPGAARPQRRQVRRGGVVQGGLPDLQRGRARLPRQPEPGPRAEHPGHLGVPGGAHGRRRGVPRRRRAARRGGRPAVPWRQLRPARARRRPGGVRRAQGEGDQERPPRHVLHVRLLRAGYRHRQGPPREPRRPHRRPRQQQRLGLRHQLRPRQVSEGMMLACVYRRRTYSYVLQVAPVFVKGALGARDCTASVFVCMLWS

SEQ ID NO: 72106 - protein, 237 aa, Zea mays; identical to SEQ ID NO: 72102
  Clone ID: LIB3597-050-C1_FLI.pep

SEQ ID NO: 72107 - protein, 110 aa, Zea mays; identical to SEQ ID NO: 72104
  Clone ID: LIB3597-058-B8_FLI.pep

SEQ ID NO: 72108 - protein, 130 aa, Zea mays
  Clone ID: LIB3600-044-G7_FLI.pep
TYVCLHHCMHGMDGSEALGLGLIYSSSRRAGGRSPSSSYLPHHVVLSRDEDVDGVDDARDVAQDGEQQADPELNPDAVAEEDADRRQQDGQQDLHERLRPHCRRRRLPSRSSSISAQSFAPCSALSSGPQ

SEQ ID NO: 72109 - protein, 124 aa, Zea mays; identical to SEQ ID NO: 47585
  Clone ID: LIB36-010-H8_FLI.pep

SEQ ID NO: 72110 - protein, 138 aa, Zea mays
  Clone ID: LIB36-012-F10_FLI.pep
RGPEAQKAVADRRKRKKKRQRARMPCLNVSTNVNLEGVDTSAILAEASKSVANIIGKPEAYVMVVLKGSVPMAFGGTQEPAAYGELVSIGGLNPDVNKKLSAGIASILESKLSVPKSRFYLKFYDSKRSDFGWNGSTF

SEQ ID NO: 72111 - protein, 338 aa, Zea mays
  Clone ID: LIB36-019-G6_FLI.pep
KGLFPLSIIYTRGHCTFFRPSHTAFYPGKIKDGMQQRMTWHCSAAWRPSLQARRPLGGAGDDGEQVVAEGVAEVLGEVLHGAFAGDVGLDEEGEHGEHGQPAVLDLLHLEDGGLVGVAGQAQGVEGPTGVQLVLKVQSVGDPVVLGAADEDDLRDHGHHQVDGDAVAEVVEGVAVQEQRAGLEPDSLRATVSAELVAGLWDDSASGTEHGPSGMDQLVGLVLGEVLWLLAQAKRVVAIVSRDLSGEVLRHLRPVQQPIRQVDPPVRTIPLGELVADVWRRRRYRSGLGLLGRLLAEKGDNLLSPRGGRCGGVAGGAREVELGAQNLGWSERRHCRRPT

SEQ ID NO: 72112 - protein, 244 aa, Zea mays; identical to SEQ ID NO: 72084
  Clone ID: LIB3606-011-G4_FLI.pep

SEQ ID NO: 72113 - protein, 280 aa, Zea mays; identical to SEQ ID NO: 46474
  Clone ID: LIB3592-058-H5_FLI.pep

SEQ ID NO: 72114 - protein, 166 aa, Zea mays; identical to SEQ ID NO: 61417
  Clone ID: LIB3592-011-E1_FLI.pep

SEQ ID NO: 72115 - protein, 335 aa, Zea mays
  Clone ID: LIB3592-083-E5_FLI.pep
ALAEAGVFRLPAQYIQPPEHRPTPSPSPIAAALSVPVVDLSTSTATDAVRAACADWGAFHVVGHGVPGELLDAVRAAGLAFFRAPMEDKLRFACDPARGAASEGYGSRMLANDDSVLDWRDYFDHHTLPESRCDPARWPDFVPGYRDTIAKYSHSMKDLAKKLLCIISENLSLPPSYIQEAVGEVFQNITISYYSPCPQPDLALGLQSHSDMGAITLLIQDDVGGLEVLKDGMWIPVPALRDGILVILADQTEIITNGRYKSSVHRAVVNAERARLSVATFYDPSKSRKICTAPQLVSENEPQKYRDVIYGDYVSSWYSKGPEGKRNIDALLIQH

SEQ ID NO: 72116 - protein, 338 aa, Zea mays; identical to SEQ ID NO: 53468
  Clone ID: LIB3592-098-F12_FLI.pep

SEQ ID NO: 72117 - protein, 103 aa, Zea mays; identical to SEQ ID NO: 44847
  Clone ID: LIB3594-002-F8_FLI.pep

SEQ ID NO: 72118 - protein, 280 aa, Zea mays; identical to SEQ ID NO: 46474
  Clone ID: LIB3594-031-D4_FLI.pep

SEQ ID NO: 72119 - protein, 103 aa, Zea mays; identical to SEQ ID NO: 44847
  Clone ID: LIB3594-048-B7_FLI.pep

SEQ ID NO: 72120 - protein, 183 aa, Zea mays; identical to SEQ ID NO: 44872
  Clone ID: LIB3595-012-C6_FLI.pep

SEQ ID NO: 72121 - protein, 183 aa, Zea mays; identical to SEQ ID NO: 44872
  Clone ID: LIB3595-046-A7_FLI.pep

SEQ ID NO: 72122 - protein, 172 aa, Zea mays; identical to SEQ ID NO: 36903
  Clone ID: LIB3596-018-H1_FLI.pep

SEQ ID NO: 72123 - protein, 180 aa, Zea mays; identical to SEQ ID NO: 52264
  Clone ID: LIB3597-063-E9_FLI.pep

SEQ ID NO: 72124 - protein, 180 aa, Zea mays; identical to SEQ ID NO: 52264
  Clone ID: LIB3356-019-D10_FLI.pep

SEQ ID NO: 72125 - protein, 178 aa, Zea mays; identical to SEQ ID NO: 41250
  Clone ID: LIB3357-035-G11_FLI.pep

SEQ ID NO: 72126 - protein, 231 aa, Zea mays; identical to SEQ ID NO: 53471
  Clone ID: LIB3357-056-E5_FLI.pep

SEQ ID NO: 72127 - protein, 244 aa, Zea mays; identical to SEQ ID NO: 72084
  Clone ID: LIB3587-280-A2_FLI.pep

SEQ ID NO: 72128 - protein, 653 aa, Zea mays; identical to SEQ ID NO: 56213
  Clone ID: LIB3591-108-G8_FLI.pep

SEQ ID NO: 72129 - protein, 181 aa, Zea mays
  Clone ID: LIB3354-002-E2_FLI.pep
KRTNSIKLQIALLHPSAATGAGREIRLRALAADAAGELDVFGHDGDALCVDGAEVGVLEQADEVGLGGFLEGQDGVALEPQIRLEVLSDLTDQALEGQLPDQQLRALLVLADLAQRHRPGPVPVGLLHAAGRRRRLPRRLGGELLARGLASGGLAGGLLRTSHLLLSLAARFLPCLDGTNL

SEQ ID NO: 72130 - protein, 164 aa, Zea mays; identical to SEQ ID NO: 72076
  Clone ID: LIB3355-016-B3_FLI.pep

SEQ ID NO: 72131 - protein, 180 aa, Zea mays; identical to SEQ ID NO: 52264
  Clone ID: LIB3356-039-C3_FLI.pep

SEQ ID NO: 72132 - protein, 180 aa, Zea mays; identical to SEQ ID NO: 37897
  Clone ID: LIB3353-009-A10_FLI.pep

SEQ ID NO: 72133 - protein, 215 aa, Zea mays; identical to SEQ ID NO: 42234
  Clone ID: LIB3279-044-D9_FLI.pep

SEQ ID NO: 72134 - protein, 266 aa, Zea mays
  Clone ID: LIB3353-009-G9_FLI.pep
LALGGRRERERERERDLVERLVGGPRTKMLAVFSGQVVEVPAELVAAGSRTPSPKTKASQLVGRFLAASEPAVSVQLGDHGHLAYSHTNQALLRPRSFAAKDEVFCLFEGVLDNLGRLSQQHGLSSKGANEVLLVIEAYKTLRDRAPYPASFMLAQLTGSYAFVLFDKSTNSLLVASDPEGRVPLFWGITADGCVAFSDDIDMLKGSCGKSLAPFPQGCFYSNALGGLKCYENPKHKVTAVPADEEEICGATFKVVEGSTVLTALH

SEQ ID NO: 72135 - protein, 463 aa, Zea mays; identical to SEQ ID NO: 53392
  Clone ID: LIB3632-032-D6_FLI.pep

SEQ ID NO: 72136 - protein, 384 aa, Zea mays
  Clone ID: LIB3245-558-A1_FLI.pep
RAGSRYIACPSQDTQLISASHAQQERGVIRHGRPHYGPGFRAGPRAPPQAHRHRGHRHSSHRPLASGRQRRRRGRAGRRGGRGEPGLGLLRGRGPRRARRDRGARDGGAARVLRAAGRAEGRRAEERGGAARVLRVGAHQEREGLEGGVRPRAARAAAAGSRGRRRARVREQVAPGSAGLQRGAGGVRESDGRAGVQAAGADRPEPEAEARPAARLLQGPDDLHPAEPLPSMPEPRPGPRRGTAQGRRRPDHPVPGRRRRARRPAALRRRVGPRQARARLFHHQRRRPHPGVEQRQVRERGAPGVSELGEREVLHALLLQPGDLHHGGAGGGAGERGRSAQVRRLQLGRLLQHQEEQQLQEAQRGEHSDRAFQEEPRPRLTTYC

SEQ ID NO: 72137 - protein, 384 aa, Zea mays; identical to SEQ ID NO: 72136
  Clone ID: LIB3061-057-C6_FLI.pep

SEQ ID NO: 72138 - protein, 355 aa, Zea mays
  Clone ID: LIB3597-062-G4_FLI.pep
LGLMHSSIPQTIKYPQIARWLARMEKQLPALTGGSKAATTTPFYLALDHRAAATSSSPPAEAPTLPPSAAAVSDPSRQSNSDRGSEIIKAKIMSHPLYPALLRAFIDCRKVGAPLEIVGRLSALADDVETNSDGRQEEQPADPELDQFMEIYCHMLVRYRQELTRPIQEADEFFKSMEAQIDSFSLDDNGYEEGGGSSDEDEQETVDLGGLPVPETGSPSGEGKELKNHLLNKYSGYLSSLWRELSRKKKKGKLPRDARQKLLHWWQLHYRWPYPSELEKAALAESTGLDAKQINNWFINQRKRHWKPAPPTMALGTPDYRMGQHGGGASSSSASAGLRVQGQYFTGGSSYPRGP

SEQ ID NO: 72139 - protein, 303 aa, Zea mays
  Clone ID: JC-ZMSHLIB3569P009D02_FLI.pep
LAAPLAVLPRRPRDVSAAYGDGDMDDDFGDFDPDDADGVGEDDDVDNEQDYDVDYDRLLAPVVKPPSPSGASASPGEEGDIAMVAADSFVSTRDSASDTVVDYAVDEDEFHKIRLLHCDFLIRKVPDPDDDVFDFREMYVTPPDTDIYSIPRVLAPMPQKYARCTKKNFGRYHVSEPPVEHLRDPLYKTEREIMKVFLTKHYRNRRADDPDFFLDFEEIYVIDSRTRSITRAKVVVSVPEGKKRDRRNDLLLIRDGGESFRIIDKTKRDDASTIIQREEWAKSRQDVEKHFRKLRDFDYSNWF

SEQ ID NO: 72140 - protein, 257 aa, Zea mays; identical to SEQ ID NO: 53415
  Clone ID: LIB3061-042-G7_FLI.pep

SEQ ID NO: 72141 - protein, 345 aa, Zea mays; identical to SEQ ID NO: 59968
  Clone ID: LIB3060-096-H12_FLI.pep

SEQ ID NO: 72142 - protein, 125 aa, Zea mays
  Clone ID: LIB3059-061-B8_FLI.pep
RSFPRALGFNPPTVRSLSLPESNSASSSPGACDMGYLQEARENHVKKKVEEALRSKMKQKALQECDFYCSKYAECARGRTFSVVWQCRKQAKELNECLHQYTNDAILEEMKKAYMIEQKSKEINQ

SEQ ID NO: 72143 - protein, 181 aa, Zea mays; identical to SEQ ID NO: 72129
  Clone ID: LIB3059-018-D2_FLI.pep

SEQ ID NO: 72144 - protein, 151 aa, Zea mays; identical to SEQ ID NO: 53405
  Clone ID: LIB143-070-B6_FLI.pep

SEQ ID NO: 72145 - protein, 280 aa, Zea mays; identical to SEQ ID NO: 46474
  Clone ID: LIB143-069-E6_FLI.pep

SEQ ID NO: 72146 - protein, 132 aa, Zea mays; identical to SEQ ID NO: 46693
  Clone ID: LIB143-006-G9_FLI.pep

SEQ ID NO: 72147 - protein, 178 aa, Zea mays; identical to SEQ ID NO: 41250
  Clone ID: LIB3068-050-H10_FLI.pep

SEQ ID NO: 72148 - protein, 244 aa, Zea mays; identical to SEQ ID NO: 59981
  Clone ID: LIB3067-040-D12_FLI.pep

SEQ ID NO: 72149 - protein, 155 aa, Zea mays
  Clone ID: LIB3069-030-A8_FLI.pep
SANRGDTKEMRVAATVGIHRLNMKPLTNSFITRVFGCLLAIVQAEHVILHEEGPSCRQQMECLRELDGVLLGAGADGTGDEDEHASLGPRRLAVDGDDLVLAGLEGKRSELAGNGGWALELLALEGEHGGLLIQPHQRRAVGVERPVVVLHEGFR

SEQ ID NO: 72150 - protein, 180 aa, Zea mays; identical to SEQ ID NO: 52264
  Clone ID: LIB3117-011-B2_FLI.pep

SEQ ID NO: 72151 - protein, 178 aa, Zea mays; identical to SEQ ID NO: 41250
  Clone ID: LIB3150-004-B5_FLI.pep

SEQ ID NO: 72152 - protein, 249 aa, Zea mays
  Clone ID: LIB3150-030-G11_FLI.pep
AKPKRLDSHSNCRLDLSNGLEESLPRSTLLKSSMVTEQLCVDTIRNNSTLTLVLQVVGTAELGEAPLSALNNLLAARELELGATQSFTGMCSIVVLASNRKEDLTNVHPSTGALRLAKGTPHSSLEPISPSTRKHLVDTKDMEGVNPDPKVEGILSCRLGHVLVAGNTGSLKSLTGDILLLPRDKVHTVGELINTLSLHANIVDPDLGVRDTTAVPGLGVWLVLDLAIASRRPSPHGDGSREQAAAANE

SEQ ID NO: 72153 - protein, 242 aa, Zea mays; identical to SEQ ID NO: 48244
  Clone ID: LIB3180-020-E12_FLI.pep

SEQ ID NO: 72154 - protein, 163 aa, Zea mays
  Clone ID: UC-ZMFLB73126E07_FLI.pep
NYANLVDQEELQKLLIASQQQIEQSKAKDTELEALKEQLGHLILERDSLLDDMDQRKTDLLEAQLLVEQLEQREQMLEAQIEMLQLEKDSLQQKTLEMDETIELLARSNQPDINPRMGDNHHRGSSEFSRRLAQSDMLLSHARHEHSRRHAAGSSRTHHGRHR

SEQ ID NO: 72155 - protein, 285 aa, Zea mays; identical to SEQ ID NO: 53470
  Clone ID: UC-ZMFLB73151A09_FLI.pep

SEQ ID NO: 72156 - protein, 180 aa, Zea mays; identical to SEQ ID NO: 52264
  Clone ID: UC-ZMFLB73171C03_FLI.pep

SEQ ID NO: 72157 - protein, 208 aa, Zea mays; identical to SEQ ID NO: 72046
  Clone ID: UC-ZMFLB73279E03_FLI.pep

SEQ ID NO: 72158 - protein, 178 aa, Zea mays subsp. mexicana; identical to SEQ ID NO: 41250
  Clone ID: UC-ZMFLTEOSINTE083H07_FLI.pep

SEQ ID NO: 72159 - protein, 244 aa, Zea mays; identical to SEQ ID NO: 36891
  Clone ID: LIB3151-031-H11_FLI.pep

SEQ ID NO: 72160 - protein, 168 aa, Zea mays; identical to SEQ ID NO: 48297
  Clone ID: LIB3060-053-A9_FLI.pep

SEQ ID NO: 72161 - protein, 168 aa, Zea mays; identical to SEQ ID NO: 48297
  Clone ID: LIB3060-053-A10_FLI.pep

SEQ ID NO: 72162 - protein, 269 aa, Zea mays; identical to SEQ ID NO: 50585
  Clone ID: LIB3060-038-G6_FLI.pep

SEQ ID NO: 72163 - protein, 226 aa, Zea mays
  Clone ID: LIB3245-317-A6_FLI.pep
AVQAELMATSEPVQESLVVHYSQPSRPRVLLAASGSVAAIKFESLCRSFSEWADVRAVATTSSLHFVDRSSLPSGIVLYTDDDEWSTWKKIGDEVLHIELRKWADVMVIAPLSANTLAKIAGGLCDNLLTCIVRAWDYSKPLFVAPAMNTLMWNNPFTERHLHTINQLGIALIPPVTKRLACGDYGNGAMAETSQIHTSVRLACKTQPHDAGSSLAGPVSNNRPSS

SEQ ID NO: 72164 - protein, 226 aa, Zea mays; identical to SEQ ID NO: 72163
  Clone ID: LIB3245-384-D9_FLI.pep

SEQ ID NO: 72165 - protein, 369 aa, Oryza sativa nipponbare
  Clone ID: LIB3431-041-H4_FLI.pep
AKTMASKQMVHMNRGQGETSYARNSILQNAEQNRMRPLIEDAIADLVCSRSMVIADLGCSSGPNALALASIAVDAFRRRCLALRRPPPPAELCVLLNDLPDNDFATVVKSLVEFRRNNGDEPVLLTGVVPGSFYGRLFAAESLHLVCSSNSLHWLSEAPEDLKMNGIPAYDVDANVRRERRAVVVGAYARQFRKDFMAFLKMRAVELVPGGRMVLSLAGRRSVDLASELTHAWESTAMTLSDMVTMGVIDKEKFETFYMPIYGPSDEEIRQIIQEEGSFLIREMQVPELTSGAYSALITSARVASMLRAAFEPIIVQHFGPTGCDGKEGIMDEFVRTAERRWSLEGSLQDELAQNPRGVLLVSLEKKPS

SEQ ID NO: 72166 - protein, 262 aa, Zea mays
  Clone ID: LIB3245-021-C9_FLI.pep
ARCRASLCSPPRLLLAEESARATERTLRAPLLSRSTRLRKADFRRGGGESTAGRSRRRRSPSGLWKTKPRCSSSRSGRDRRRRGRKYESAEVRRDCILRFPLRASTPSSDPDIFASIPLLSVEIFGSSAHLRTASSKEDTMKSLLKVLVDCAEDATKSLGGLVDHALDHMHDEEILARTLFAMKEKLDLLHQDALETKVQAFPEIAKYNRDDISVEPTSPSTPPTVTEPSVDEEEFYCPDVSDEWYFSDSDRSTRNSYCNLY

SEQ ID NO: 72167 - protein, 262 aa, Zea mays; identical to SEQ ID NO: 72166
  Clone ID: LIB3245-022-C9_FLI.pep

SEQ ID NO: 72168 - protein, 180 aa, Zea mays; identical to SEQ ID NO: 37897
  Clone ID: LIB3353-005-C9_FLI.pep

SEQ ID NO: 72169 - protein, 249 aa, Zea mays; identical to SEQ ID NO: 72152
  Clone ID: LIB3354-024-H1_FLI.pep

SEQ ID NO: 72170 - protein, 178 aa, Zea mays; identical to SEQ ID NO: 41250
  Clone ID: LIB3354-069-A4_FLI.pep

SEQ ID NO: 72171 - protein, 180 aa, Zea mays; identical to SEQ ID NO: 52264
  Clone ID: LIB3354-103-B10_FLI.pep

SEQ ID NO: 72172 - protein, 226 aa, Zea mays; identical to SEQ ID NO: 53443
  Clone ID: LIB3245-107-B4_FLI.pep

SEQ ID NO: 72173 - protein, 128 aa, Zea mays
  Clone ID: 701167894_FLI.pep
AVLQQRGGGGGRVQPPGAAGRRHHRAGVHAPLRAAQEALRRRLPVLLTPQSALAPPRCAAAAAWPSSCGTGASGSNQQVSDQLQHVCRGASSSWGEGSRAGQALVPHIIFRSTNNFYSTVISILLQLM

SEQ ID NO: 72174 - protein, 323 aa, Glycine max; identical to SEQ ID NO: 71931
  Clone ID: 700876145_FLI.pep

SEQ ID NO: 72175 - protein, 145 aa, Zea mays; identical to SEQ ID NO: 53346
  Clone ID: 700457789_FLI.pep

SEQ ID NO: 72176 - protein, 288 aa, Zea mays; identical to SEQ ID NO: 47549
  Clone ID: CC-ZMLE189097C07_FLI.pep

SEQ ID NO: 72177 - protein, 280 aa, Zea mays; identical to SEQ ID NO: 46474
  Clone ID: LIB3633-002-C12_FLI.pep

SEQ ID NO: 72178 - protein, 608 aa, Zea mays; identical to SEQ ID NO: 59912
  Clone ID: LIB3632-017-A9_FLI.pep

SEQ ID NO: 72179 - protein, 345 aa, Zea mays; identical to SEQ ID NO: 59968
  Clone ID: LIB3592-091-A1_FLI.pep

SEQ ID NO: 72180 - protein, 269 aa, Zea mays; identical to SEQ ID NO: 50585
  Clone ID: LIB3353-001-A12_FLI.pep

SEQ ID NO: 72181 - protein, 215 aa, Zea mays
  Clone ID: LIB3332-029-D2_FLI.pep
LVGGAQNLTLTTMFSLFYGLWKHVFSKAEFHVLILGVHKAGKTTLLEKLKSIYLKGEGLPHDRIVPTVGLNIGRIEDANVKLVFWDLGGQPGLRTIWEKYYEEAHAVIYVIDSASASSFEDAKSALEKVLRHEDLHGAPILIFANKQDSPAAVTEEELARHLHLKELDERPCMFQAGSAFNGTGIKHGVDWLVEEMERSKRTEALRARTEAAGKI

SEQ ID NO: 72182 - protein, 355 aa, Zea mays; identical to SEQ ID NO: 72138
  Clone ID: LIB3597-057-G4_FLI.pep

SEQ ID NO: 72183 - protein, 413 aa, Oryza sativa
  Clone ID: LIB4309-011-H12_FLI.pep
CLPPLRSPCLPAPSAASPAYPRLASSAASASAPARLRSRITLPGGRSPVPPMDPAASAAESSSLSSRDVAAMPDSPPRRAARHRRAQSEILLGAALPDDIAFDADLGVVGEVGGGGGDDYEEEEEDDEEEEMEGAGGSRMFEMFLEAGGKLETPEPAAPLPPPPARPRHQHSMSMDGSTSLASSAAGVAGRMGADAKKAISDAKLAELALVDPKRAKRILANRQSAARSKERKMRYIAELERKVQTLQTEATTLSAQLSMLQRDTTGLTSENSDLKIRVQTMEQQVRLQDALNDRLRDEIQQLKVATGQVNANCGKVGNFGLSSFGGANPQGYQRSHIQSLLAAQQLQQLQIHSQHQQQQMHLQQHHHLSTVQQQLLQEGLPLPGDLKMKGIVAASHAQNAGASESHALRSEP

SEQ ID NO: 72184 - protein, 413 aa, Oryza sativa; identical to SEQ ID NO: 72183
  Clone ID: LIB4309-011-G12_FLI.pep

SEQ ID NO: 72185 - protein, 231 aa, Zea mays; identical to SEQ ID NO: 53471
  Clone ID: LIB3069-006-C7_FLI.pep

SEQ ID NO: 72186 - protein, 362 aa, Zea mays; identical to SEQ ID NO: 72055
  Clone ID: LIB3069-017-F12_FLI.pep

SEQ ID NO: 72187 - protein, 160 aa, Zea mays; identical to SEQ ID NO: 72006
  Clone ID: UC-ZMFLB73200H03_FLI.pep

SEQ ID NO: 72188 - protein, 248 aa, Zea mays
  Clone ID: 700047874_FLI.pep
AMAAGQFAAAGVLTGLLALATLASCNTDGDILYKQRLAWEDPNNVLQSWDPTLANPCTWFHVTCNLNNSVVRVDLGKAGISGPLLPDLGALESLQYMELFGNSLNGSIPSTLGNLTDLISLDLWDNLLTGPIPTTLGSISTLRYLRLYENNLTGPIPPSFGNLTSLLELKLHRNSLSGSIPASLGDIKSLQFLKLNENMLTGTVPLEVLSLVVVGNLTELNIARNNLDGTVRSSGLRVTAVIQDMRIA

SEQ ID NO: 72189 - protein, 156 aa, Zea mays
  Clone ID: 701180513_FLI.pep
PKSSGKQTGDETLMENEPVKAVAVEENIGRDDSLSISYQLACKTVAELPVTDAQSPASSSGHFIAGNFDNTHPTSSATSDNAINSLTSKFGAELAQSHDSTDKKGQNDAEEVEELESMTPAAYSEPPRNIQLSLRSASAKVKPSTLPRRSARLLPK

SEQ ID NO: 72190 - protein, 423 aa, Glycine max; identical to SEQ ID NO: 43754
  Clone ID: 700834821_FLI.pep

SEQ ID NO: 72191 - protein, 177 aa, Glycine max
  Clone ID: 701155981_FLI.pep
FLQHFPLFLINQICKTLISLTLTKPPNPMASIQRPASSGSSEGGDPVMYERKRKRMESNRESARRSRMKKQKQLEDLTDEVSRLEGENARLAPSIKVKEEAYVEMEAANDILRAQTMELADRLRFLNSIIEIADEVGGESFEIPQIPDPLFMPWQIPHPMMATPPDMFFHGNEGLFA

SEQ ID NO: 72192 - protein, 452 aa, Zea mays; identical to SEQ ID NO: 51739
  Clone ID: LIB3180-035-G10_FLI.pep

SEQ ID NO: 72193 - protein, 231 aa, Zea mays; identical to SEQ ID NO: 53471
  Clone ID: LIB3182-014-G11_FLI.pep

SEQ ID NO: 72194 - protein, 476 aa, Zea mays
  Clone ID: CC-ZMPO148065C01_FLI.pep
AYLRDSKLLPFPTAAAAAPPHSVDTMRECISIHIGQAGIQVGNACWELYCLEHGIQADGQMPGDKTIGGGDDAFNTFFSETGAGKHVPRAVFVDLEPTVIDEVRTGTYRQLFHPEQLISGKEDAANNFARGHYTIGKEIVDLCLDRIRKLADNCTGLQGFLVFNAVGGGTGSGLGSLLLERLSVDYGKKSKLGFTVYPSPQVSTSVVEPYNSVLSTHSLLEHTDVAILLDNEAIYDICRRSLDIERPTYTNLNRLVSQVISSLTASLRFDGALNVDVNEFQTNLVPYPRIHFMLSSYAPVISAEKAYHEQLSVAEITNSAFEPSSMMAKCDPRHGKYMACCLMYRGDVVPKDVNAAVATIKTKRTIQFVDWCPTGFKCGINYQPPSVVPGGDLAKVQRAVCMISNSTSVVEVFSRIDHKFDLMYAKRAFVHWYVGEGMEEGEFSEAREDLAALEKDYEEVGAEFDEGEEGDDGDEY

SEQ ID NO: 72195 - protein, 246 aa, Zea mays subsp. mexicana
  Clone ID: UC-ZMROTEOSINTE002H06_FLI.pep
ALVSAVALIQLVRIQRRVPEFGWTTQKVFHLMNFLVNGVRALVFGFHVHVFLLRAKVYKLVLLDLPGLLFFSTYTLLVLFWAEIYHQARSLPTDKLRPAYIAVNTIIYVVQVCIWIYLGINDNAVVELASKIFIVAVSFVALLGFSVYGGRLFVLLRRFPIESKGRQKKLYEVGTVTAICVTCFLIRCVVVALSAFDADVSLEVLDHPVLDFFYYMLAEILPSALVLFVLRKLPPKRVSAQYHPIN

SEQ ID NO: 72196 - protein, 181 aa, Zea mays
  Clone ID: UC-ZMFLMO17075H06_FLI.pep
LDETLVHSTLEHCEDADFTFPVHFNFREHTIYVRCRPYLKEFLDRVASVFETIIFTASQSIYAEQLLNVLDPKRKLFRHRVYRESCVYVEGNYMKDLTVLGRDLTRVMIVDNSPQAFGFQLDNGIPIESWFDDPNDMELLKLLPFLESLVGVEDVRPYIARKFNLREKVATASSLTIDMQM

SEQ ID NO: 72197 - protein, 181 aa, Zea mays; identical to SEQ ID NO: 72196
  Clone ID: UC-ZMFLMO17102C12_FLI.pep

SEQ ID NO: 72198 - protein, 244 aa, Zea mays; identical to SEQ ID NO: 59981
  Clone ID: UC-ZMFLB73185A09_FLI.pep

SEQ ID NO: 72199 - protein, 288 aa, Zea mays; identical to SEQ ID NO: 47549
  Clone ID: UC-ZMFLB73127C04_FLI.pep

SEQ ID NO: 72200 - protein, 482 aa, Zea mays; identical to SEQ ID NO: 56456
  Clone ID: UC-ZMFLB73151G03_FLI.pep

SEQ ID NO: 72201 - protein, 482 aa, Zea mays; identical to SEQ ID NO: 56456
  Clone ID: UC-ZMFLB73344C03_FLI.pep

SEQ ID NO: 72202 - protein, 350 aa, Zea mays
  Clone ID: UC-ZMROB73075E11_FLI.pep
IHRPGFAMIPTRPAQASFRDRTNEFRAAVESARRHAVPSSSSAAAAPSSSSTRPLDGLIAATSARSEFNNRASKIGLGIHQTSQKLTRLAKLAKRTSVFDDPTVEIQELTAVIKKDITALNNAVVDLQALCNSQNESGSLSKDTSNHSTTVVDNLKNRLMSATKEFKEVLTMRTENLKVHENRRQMFSSSAAKDASNPFIRQRPLVARDPSESSVPPAPWASDSASTPLFQRKKTNGDHGASSSQPFAQQQQLAVQQDSYMQSRAEALQNVESTIHELSNIFTQLATMVSQQGELAIRIDENMEETVANVEGAQGQLLKYLNSISSNRWLMMKIFFVLMVFLMIFIFFVA

SEQ ID NO: 72203 - protein, 288 aa, Zea mays
  Clone ID: LIB3245-085-E9_FLI.pep
QPRQTEQRWMIMDSSIISSVGVVVEGCVRLGGPGGGGGLDGGRRRDGRAEQVPGQVRDAPEVEGVEDLEGEDDLVELDLAVDALEDTGAAGDRQVRLLVGQVRALHRDVAVVSEVEAVDGLVAVAVAVGDVLDEHADARGDAQPLVQAAVVHLVGEGDEVAQRVLRLLGAEAQVRGALAVPLVDLVHVQLLHLGRPRVLGRRGLGREQRRPHGDAAAAALPGPAHRYDSGRLAHLGEPRGGGARDPDGCRAPERGGHGDRAVESRTVQPRSRCDAEEEEVGGWPGRLA

SEQ ID NO: 72204 - protein, 288 aa, Zea mays; identical to SEQ ID NO: 72203
  Clone ID: LIB3245-335-B6_FLI.pep

SEQ ID NO: 72205 - protein, 369 aa, Oryza sativa nipponbare; identical to SEQ ID NO: 72165
  Clone ID: LIB3431-041-H12_FLI.pep

SEQ ID NO: 72206 - protein, 610 aa, Zea mays
  Clone ID: LIB3245-021-G3_FLI.pep
IDWCQLIFNDLCEAAKKWHNRITTNVSTTIYGCSIVVLLYYLDHLHTAAAPHNKSGTPRIKFFDKNSIKALTKADKRKVRHGAESFGHCEFRSSTETCYAVGPKIDRQSEPECRTNIFDAPRPGPMPRPTFNIKLPSIKEMMSSKINDLPHRHRSKFTDILAAYDLEVDKSCVAIKDSIDKIIVKQYDIADKFIELIDEVLRAESENLENETDEPQQPGNSADSAGHTVDATQPTPDMPSQASQLETQLGATQFEEIHERQQHIRTVLETFPDESDVVSDQQRGAMATEEMEQNDSGPVFDQTPTPHVDTLKGTTISGSDPPLTEQECIRSLWDLICSKDIDQSRVVIDYGDYSANCMDIYESFAEGKCLEDVFMQCFIECVRDDSKNHRRTLTSNRLILDVNVGALLNFEEQERHSKNPQSFDQNVLQNCLHNTLPALVNPDKCKSIMVPMLSRGHWTLYVINLHHRVIHILDSNPYGIQLGGTEWKDYHYDPIYLGGRKFPWARVIMSRLSKALQHVCPNAEFPKFGNFPLDMPSNCPTMRTGSNDCGFFVMSYMKSYDHNAGVISSFNQPDNSRDLRAHALHQLTFHRINKALPLPLDIQRFMFARN

SEQ ID NO: 72207 - protein, 610 aa, Zea mays; identical to SEQ ID NO: 72206
  Clone ID: LIB3245-022-G3_FLI.pep

SEQ ID NO: 72208 - protein, 523 aa, Oryza sativa
  Clone ID: UC-OSFLM202124E12_FLI.pep
SSSSLTSSMAGGFAVEAKVAGGGERREFKGKITWYVWLCGIIAATSGLMFGYDVGISGGVTAMDGFLIKFFPSVYARKHRARENNYCKFDDQRLQLFTSSLYLAALAASFAASRLCTRLGRRRTMQLASVFFLGGTALCAGAANLAMLIVGRICLGVGVGFGNQAAPLFLSEIAPAHIRGALNILFQLDVTIGILIANVVNYFTSSAHPSTGWRYSLGGAGVPAAVLFLGSLVITETPTSLVERGRRDAGRATLERIRGTRDVGDELDEIARACEAAAALSAEESAYRRLRRRESRPPLVIAVAMQVFQQFTGINAIMFYAPVLFQTMGFKSNGSLLSAVVTGGVNVVSTLVSIVAVDKIGRRRLLLQACGQMLIAQTAVGAIMWEHVKANGNPGEKWAVAIVVLICVYVSSFAWSWGPLGWLIPSETFPLATRTTGFSFAVSSNMLFTFLIAQAFLSMMCSMKAFIFFFFAIWIVIMAAFVFWLLPETKGVPIDEMVDTVWRRHWFWKRFFTDAGDGRIGNC

SEQ ID NO: 72209 - protein, 523 aa, Oryza sativa; identical to SEQ ID NO: 72208
  Clone ID: UC-OSFLM202132E11_FLI.pep

SEQ ID NO: 72210 - protein, 195 aa, Zea mays; identical to SEQ ID NO: 72094
  Clone ID: LIB4315-042-H7_FLI.pep

SEQ ID NO: 72211 - protein, 398 aa, Zea mays; identical to SEQ ID NO: 53395
  Clone ID: 700428946_FLI.pep

SEQ ID NO: 72212 - protein, 212 aa, Zea mays; identical to SEQ ID NO: 53444
  Clone ID: LIB3245-070-A2_FLI.pep

SEQ ID NO: 72213 - protein, 373 aa, Zea mays; identical to SEQ ID NO: 53344
  Clone ID: LIB3245-238-D8_FLI.pep

SEQ ID NO: 72214 - protein, 241 aa, Zea mays; identical to SEQ ID NO: 53350
  Clone ID: LIB3245-379-D11_FLI.pep

SEQ ID NO: 72215 - protein, 305 aa, Zea mays; identical to SEQ ID NO: 53343
  Clone ID: LIB3245-447-G5_FLI.pep

SEQ ID NO: 72216 - protein, 250 aa, Zea mays; identical to SEQ ID NO: 53402
  Clone ID: LIB3245-492-F2_FLI.pep

SEQ ID NO: 72217 - protein, 174 aa, Glycine max
  Clone ID: 700995613_FLI.pep
VLPLSLFLVHPIFTLQCTRDGAPSKFPCMQVLPRSTFFRSTMGKHCRQSGKMLRGGLSALFRQIQSQSSSMPLQEDKFGGFKDVGTNVSRAALRRDMVTQMIPQGSSCSSPNLRPSFSASTLSTLPVTELQTVGSSIRDMQVDEHVTVTRWSKKHRALFTGRGSEQAKVGKKEN

SEQ ID NO: 72218 - protein, 386 aa, Zea mays; identical to SEQ ID NO: 72029
  Clone ID: 700048277_FLI.pep

SEQ ID NO: 72219 - protein, 307 aa, Zea mays; identical to SEQ ID NO: 47130
  Clone ID: LIB3594-054-F4_FLI.pep

SEQ ID NO: 72220 - protein, 244 aa, Zea mays
  Clone ID: UC-ZMFLB73301E04_FLI.pep
SDLVADVPPDFEPEPRGFLPHVHSPEARAWALEVHALWKRLARRVAPDVAARPDRHTLMPLPGRAVVPGSRFREVYYWDSYWVIRGLLVSKMYDTAKTIVLNLVYLLEKYGFVPNGARSYYTNRSQPPLLSSMVLEIYRATGDVEFVRTVFHSLLKEHSFWMSEIHNVAIADNHGRVHNLSRYQARWNKPRPESATIDEELASKLNSMAAKEKLYCEIASTAESGWDFSSRWMRFGCLLSLKRN

SEQ ID NO: 72221 - protein, 408 aa, Zea mays; identical to SEQ ID NO: 72086
  Clone ID: LIB4743-017-A1_FLI.pep

SEQ ID NO: 72222 - protein, 168 aa, Zea mays; identical to SEQ ID NO: 37658
  Clone ID: LIB4185-008-H11_FLI.pep

SEQ ID NO: 72223 - protein, 185 aa, Zea mays
  Clone ID: 700048221_FLI.pep
ALDRLGISSSDRAPAIRHGCRQLRPRLHRQGRKRRRRAPEHLQGQGSPHRQRRITVWPDQLQLHGACPATRDVQGPGFRDPCVPVQPVRRAGARHERGDRPARLRSLQGQVPDSSQGRCERRGRCAHLQVSEIQQDRPHGRRHQVELRQVLGGQTGACRRAVCSDHLPTQHPEGHQEAARRELLN

SEQ ID NO: 72224 - protein, 409 aa, Zea mays
  Clone ID: 700048983_FLI.pep
FFLAGTAASPKGCDGQHNLSSPPACRHGGGGGDACRGASLVSGPAIRCRIHHVQDPKPMVGLPEPHGLPLGRAAAGPRQGQGLPLPLRLPAPRVVRVVQRRLRRRPGGGHQGVPAQLRPGHHGRDGRVHGGADDGSAVRRRRHHQRHVHHGRRQRLGLGGARARPEPLHLLPGVPVVAALQEEPDVRGHADLADLHRPRDAEPGVGAGLRAVVGGHDAQLHGDGVGARRGHHHRLLRGGPRRRRGVRRAAGHAGARLLADGRALPPGRGRGVGRQRRRGARGLRRGRRPRVRRRARDRPPPRPGPLGRALRHHVPHHHLAHQQGGPGPGRRRRHPEPVRRQPQLQGRRAARHQQPGHGQRRDHELPGAVDRRRCRGRWALGSVVVIGRFFFLKKTFALADFNSCAYIDQ

SEQ ID NO: 72225 - protein, 304 aa, Zea mays; identical to SEQ ID NO: 42274
  Clone ID: 700072026_FLI.pep

SEQ ID NO: 72226 - protein, 494 aa, Zea mays; identical to SEQ ID NO: 59774
  Clone ID: 700614592_FLI.pep

SEQ ID NO: 72227 - protein, 301 aa, Zea mays
  Clone ID: UC-ZMFLB73299B10_FLI.pep
REREREKTSSSSIVSAFLHQVVCRSVSCDLPEAKLGQEGKMASPSSTSNNSAFSPVAASAGTTMPGAGAPCAACKFLRRKCLPGCVFAPYFPPEEPQKFANVHKVFGASNVTKLLNELLPHQREDAVSSLAYEAEARVKDPVYGCVGAISVLQRQVHRLQKELDAAHAELLRYACGDVAAGIPTALPVVSAAPRLSTAPMTTTSPGQFAAGMYGSGRRLGVVDGLAAPPLPPSGGGGGCYFMRNHHNNVVISSSPGADVAPVLPYASVANWAVNAISASTTTTSGSESIGLDHKEGGDSSM

SEQ ID NO: 72228 - protein, 213 aa, Zea mays
  Clone ID: LIB3245-218-D3_FLI.pep
RSSSRLAAPRPSPRPRPYRLPLSHIPTLIALSLHITTFPSHHLSSLSPRPPFLLRPPPPHAAARAPPRGAVARCRDVGGAAGAAGERGVVHRAERGVGQGAAVGAGLRVRPRGGCGLRAHPDQRPLLPAQHARRPRLLRLQLHLPAFPRRAGGMRLRRHCHRHAHRPQLWIMHLPFISKHCRANRITWFNIHARDSHFFVAKRHWEHRRIEPT

SEQ ID NO: 72229 - protein, 249 aa, Zea mays; identical to SEQ ID NO: 54913
  Clone ID: LIB3245-233-C12_FLI.pep

SEQ ID NO: 72230 - protein, 145 aa, Zea mays
  Clone ID: LIB3587-196-F2_FLI.pep
HHSQASTHSPTSSRTQVSRDKTVDMARTQSAVAVAVVAAVLLLAAAATTSEAAITCGQVSSAIAPCLSYARGTGSGPSASCCSGVRNLKSAASTAADRRAACNCLKNAARGVSGLNAGNAASIPSKCGVSIPYTISTSTDCSRVN

SEQ ID NO: 72231 - protein, 146 aa, Zea mays; identical to SEQ ID NO: 65874
  Clone ID: LIB3587-210-A4_FLI.pep

SEQ ID NO: 72232 - protein, 145 aa, Zea mays; identical to SEQ ID NO: 72230
  Clone ID: LIB3587-219-A3_FLI.pep

SEQ ID NO: 72233 - protein, 335 aa, Zea mays; identical to SEQ ID NO: 72115
  Clone ID: LIB3592-091-E5_FLI.pep

SEQ ID NO: 72234 - protein, 146 aa, Zea mays; identical to SEQ ID NO: 65874
  Clone ID: LIB3596-036-D1_FLI.pep

SEQ ID NO: 72235 - protein, 145 aa, Zea mays; identical to SEQ ID NO: 72230
  Clone ID: LIB3900-007-F3_FLI.pep

SEQ ID NO: 72236 - protein, 125 aa, Zea mays; identical to SEQ ID NO: 72142
  Clone ID: LIB3918-003-A7_FLI.pep

SEQ ID NO: 72237 - protein, 245 aa, Zea mays; identical to SEQ ID NO: 53472
  Clone ID: LIB4148-002-D11_FLI.pep

SEQ ID NO: 72238 - protein, 145 aa, Zea mays; identical to SEQ ID NO: 72230
  Clone ID: LIB4185-015-B8_FLI.pep

SEQ ID NO: 72239 - protein, 378 aa, Glycine max; identical to SEQ ID NO: 71914
  Clone ID: LIB3028-030-C9_FLI.pep

SEQ ID NO: 72240 - protein, 366 aa, Glycine max; identical to SEQ ID NO: 37097
  Clone ID: 701207126_FLI.pep

SEQ ID NO: 72241 - protein, 292 aa, Zea mays; identical to SEQ ID NO: 47382
  Clone ID: LIB3689-223-D5_FLI.pep

SEQ ID NO: 72242 - protein, 410 aa, Glycine max
  Clone ID: 701101540_FLI.pep
KRILPLSPKPTNQDAYLLAPNMLRFEDVTATTLTIILGSEEPSGEILAGYTLWHRKVDDVDYPMDPTCTSLLPNRRFSVSGLIPGTEYSFKVVSNDLRESGMCEVQVSTEHGEEEVPNCSATERSQSPVTNCSSLSNPSSVEDETNNCNPYSDLTDNRADHYPSYHKDSNKLASGNLSNDAINCSNLGGAGLPPDADSLSDKQHAGGTTASIPSSDVLKLENKHSPEEQITEDMSTDDGLISPALTGRECVPLVGSSEGGLPNTPCKLETLKDGPGKNKRSKSSGKDQENVSGKREGPQDGSTSKKRSGERQEEGRVANGFSDRDFEYYVKVIRWLECEGHIEKNFRQKFLTWYSLRATPQEVRIVKIYIDTFLEDPASLAEQLVDTFSECLSSKRTSVVPAGFCMKLWH

SEQ ID NO: 72243 - protein, 429 aa, Zea mays; identical to SEQ ID NO: 67489
  Clone ID: LIB3608-004-H1_FLI.pep

SEQ ID NO: 72244 - protein, 429 aa, Zea mays; identical to SEQ ID NO: 67489
  Clone ID: LIB3608-030-D7_FLI.pep

SEQ ID NO: 72245 - protein, 164 aa, Glycine max; identical to SEQ ID NO: 56817
  Clone ID: 700742801_FLI.pep

SEQ ID NO: 72246 - protein, 183 aa, Glycine max; identical to SEQ ID NO: 53332
  Clone ID: 700744240_FLI.pep

SEQ ID NO: 72247 - protein, 95 aa, Glycine max
  Clone ID: LIB3028-043-E7_FLI.pep
LKTRSFDAIRAELRAFFDVHDQEGSYPGGVHLEMTGQNVTECVGGSRTITYDDLSSRYHTHCDPRLNASQSLELAFNIADRLRKRRLNSTRSLGI

SEQ ID NO: 72248 - protein, 175 aa, Zea mays
  Clone ID: LIB3075-017-B11_FLI.pep
QPRLPLRAPLRRRRLLRHRRRLRPRARAPRGLPRRHTARLHLHSPRISRPRGPSCGAHVRVSLAHVRHLSLRGGPTVPRNIADRLAAVLDQHRGAPLLRRRGQPPRGPRHAAVGRRRQRDALRSTTPSSPHALRSWTLLRSISFHCVFYSMLPLLYYTHTADSIDYHKALALLLA

SEQ ID NO: 72249 - protein, 154 aa, Zea mays subsp. mexicana
  Clone ID: UC-ZMROTEOSINTE082C01_FLI.pep
PDDSSSKEPNNIENVVVDEEKGSVVTANRPDSVTRLKRAAATAVSAAAVKARFLGDQEEYQIRRLTALVIEKLFQKIEVKMSLFSEIEQVVFRTREYTEKTRKKLLKERNAIIAARMGALPSRPNQPGVAGNRLPPGYGNPPVRPPNAMPRPTS

SEQ ID NO: 72250 - protein, 367 aa, Glycine max
  Clone ID: 700844396_FLI.pep
RTPLHVASLHGWIDVATCLIEFGADVNAQDRWKNTPLADAEGAKKSNVIELLQSHGGLSFGQNGSHFEPKPVAPPLPNKCDWEVEPTELDFSNSVRIGKGSFGEILKAHWRGTPVAVKRILPSLSEDRLVIQDFRHEVNLLVKLRHPNIVQFLGAVTARKPLMLITEYLRGGDLHQYLKEKGALSPATAINFSMDIVRGMAYLHNEPNVIIHRDLKPRNVLLVNSSADHLKVGDFGLSKLITVQSSHDVYKMTGETGSYRYMAPEVFKHRRYDKKVDVYSFAMILYEMLEGEPPFASREPYEGAKYAAEGHRPHFRAKGYTPELQELTEQCWAHDMSQRPSFIEILKRLEKIKENLPTENHWHLFTS

SEQ ID NO: 72251 - protein, 287 aa, Glycine max
  Clone ID: 700683791_FLI.pep
KAMATSKLKTQNVVVSLSLTLTLVLVLLTSKANSAETVSFSWNKFVPKQPNMILQGDAIVTSSGKLQLNKVDENGTPKPSSLGRALYSTPIHIWDKETGSVASFAASFNFTFYAPDTKRLADGLAFFLAPIDTKPQTHAGYLGLFNENESGDQVVAVEFDTFRNSWDPPNPHIGINVNSIRSIKTTSWDLANNKVAKVLITYDASTSLLVASLVYPSQRTSNILSDVVDLKTSLPEWVRIGFSAATGLDIPGESHDVLSWSFASNLPHASSNIDPLDLTSFVLHEAI

SEQ ID NO: 72252 - protein, 122 aa, Glycine max
  Clone ID: 700685656_FLI.pep
RDLIIESHDHAFQVKEGEMLFGYQPFATKDPRIFERAEEFVGDRFVGEEGEKLLKHVLWSNGPETESPTLGNKQCAGKDFVTLVSRLFVVEFFLRYDSFEIQVGTSPLGSSVTITSLKRASF

SEQ ID NO: 72253 - protein, 163 aa, Zea mays; identical to SEQ ID NO: 72154
  Clone ID: UC-ZMFLB73001C10_FLI.pep

SEQ ID NO: 72254 - protein, 235 aa, Zea mays
  Clone ID: LIB3069-020-A4_FLI.pep
PPFNSRLHKNVTYFSIHTLLATHLTTQNEVVFLEFLHFSSRLLGHTTFYTIHFLADLAYGLVVVVKRPLVLGLIQPEPGRHVLVEARVRFLDARDGVPEEAERRYVMLAPRGRLLVLRRRHLHRRQRDIHRSRRRGRGEHHRRRHGPALVVPRRGRKGGRRGCPLRDGCGDIRARGLERRRAPSAPGRASGGWRRDEDGEVPGPPNHGQWQRRWWRWRGRGPHRGGWYRLRERGV

SEQ ID NO: 72255 - protein, 384 aa, Zea mays; identical to SEQ ID NO: 72018
  Clone ID: UC-ZMFLB73136F08_FLI.pep

SEQ ID NO: 72256 - protein, 276 aa, Zea mays
  Clone ID: 700424837_FLI.pep
LSRVQHKNLVKFIGACLEPVMVVVTELLVGGSLRKYLVSLRPRSLEPRVAVGFALDIARAMECLHAHGIIHRDLKPENLLLTADQRTVKLVDLGLAREETLTEMMTAETGTYRWMAPELYSTVTLRHGEKKHYNHKVDVYSFAIVLWELLHNKLPFEGMSNLQAAYAAAFKNIRPSADNLPEELSEILTSCWKEDPNDRPNFTQIIQMLLHYLSTLSPQETLAGPRRTFSSENTILPPESPGTSSLMASRGDLGDTPKGKKEDKPRGFFFCFSECY

SEQ ID NO: 72257 - protein, 276 aa, Zea mays; identical to SEQ ID NO: 72256
  Clone ID: 700426186_FLI.pep

SEQ ID NO: 72258 - protein, 335 aa, Glycine max
  Clone ID: 700562872_FLI.pep
DQPTGTGFSYSTDKRDIRHDEEGVSNDLYDFLQAFFAEHPEYVKNDFFITGESYAGHYIPAFAARVHRGNKAKEGIHINLKGFAIGNGLTDPGIQYKAYTDYALDMGIIQKADYERINKVMVPACEMAIKLCGTDGKIACTASYFVCNTIFNSIMSHAGDINYYDIRKKCEGSLCYDFSNLEKYLNQKSVRDALGVGDIDFVSCSSTVYQAMLVDWMRNLEVGIPALLEDGINMLVYAGEFDLICNWLGNSKWVHAMEWSGQQEFVVSSEVPFTVDDSEAGLLKKYGPLSFLKVHDAGHMVPMDQPKASLEMLKRWTQGTLSESAADAEKLVAEL

SEQ ID NO: 72259 - protein, 325 aa, Glycine max
  Clone ID: 700681050_FLI.pep
VAGNGAATVYSALALKAMSRHFRCLKDGILSQIQATRKAMGEKDPVAPGTTRGETPRLKVIDQTLRQQRAFQQMSMMETHPWRPQRGLPERAVSVLRAWLFEHFLHPYPSDVDKHILARQTGLSRGQVSNWFINARVRLWKPMVEEMYLEEVKDPENNIASSEGATDQDNDINPNNVQYPPPPLSSRSEDQKPSLVRIDSECASSIINNHSTPDNKNDPKGQEQCFGSVELDFSSYTHHSSGMVSYGSSDQNGNNNQSGVSLTLGLQQHGVSLAFPPATQSSLYYPRDQIEDCQPVHQYSLLDGEGQNLPYRNLMGAQLLHDLAG

SEQ ID NO: 72260 - protein, 285 aa, Glycine max
  Clone ID: 700682054_FLI.pep
KIEDEVRGLRRELNEKIEEKGEILENGLKKMEAKNEELERYLSELKGEDWLSKEEFEKFVDEVRSVKGSGYEGGGLDEIREFARRVIVKEIEKHAADGLGRVDYALASSGGAVVKHSEVFDLVRGNWFLKSARNGVHPNAEKMLKPSFGEPGQCFPLKDSRGFVQIRLRTAIIPEAVTLEHVAKSVAYDRSSAPKDCRVSGWLQEHNADSAINTEKMHLLAEFTYDLEKSNAQTFNVLNSAASGVINTVRLDFTSNHGSPSHTCIYRFRVHGHEPDSVSMLALEL

SEQ ID NO: 72261 - protein, 235 aa, Zea mays; identical to SEQ ID NO: 72254
  Clone ID: LIB3067-049-B8_FLI.pep

SEQ ID NO: 72262 - protein, 146 aa, Glycine max; identical to SEQ ID NO: 42238
  Clone ID: 700746753_FLI.pep

SEQ ID NO: 72263 - protein, 133 aa, Zea mays subsp. mexicana
  Clone ID: UC-ZMROTEOSINTE034C01_FLI.pep
PSTKNRDDIVFFHRTYVALHDSTGPPSKTKRGEKKRKRGEGEEKLQFLPPAATIVELEAAGRPAGEGHGEEEDDEVEEDDDELHLEHGEEELDHEHQQQRVEYDRYGHLQGLHRRRRPDHQQSKLSSLWSGDW

SEQ ID NO: 72264 - protein, 296 aa, Zea mays; identical to SEQ ID NO: 71870
  Clone ID: 700052158_FLI.pep

SEQ ID NO: 72265 - protein, 125 aa, Zea mays
  Clone ID: 700082815_FLI.pep
FSVHKRWLNQSECSPQPKNLQKIRLAITRSNGASLDAMSQHKLEQKAHAKKHVRLLSAESWHLLQVLGILSPLKRAGSFRLIFVLFFLHVIFVTINFQKTESALVQHSSHQEHIQIVLYQIYPGL

SEQ ID NO: 72266 - protein, 185 aa, Glycine max
  Clone ID: 700680238_FLI.pep
PIWSVISSNLRGYKGDLTPAQALDLISTQNYVLIDIRSEKDKDKAGIPRLPSNAKNRMVAIPLEELPSKLRGQVKNVKKLEAEIVALKISYLKKINKGTNVVILDSYSDVAKTVGRTLTSLGFKNTWIVADGFSGNKGWLQSRLGTDSYNFSFAEVLSPSRVIPAAVRSFGTTSQSSTKLLPGAE

SEQ ID NO: 72267 - protein, 118 aa, Zea mays
  Clone ID: 700155750_FLI.pep
RKNYQRDETRVFVRCNISPEYQFLAYKFVFGLDVGLKRLVTVRMVTNSSAAEGWIPTVLSKSALVAPHLTAIAMPWIISGASGPHMDAPSTLSVSASTTSFMIVFSWRLDMLFFIGLH

SEQ ID NO: 72268 - protein, 538 aa, Zea mays
  Clone ID: JC-ZMXLIB3526039CC01_FLI.pep
YPIPRTNLPHAMSKTESRKLSDDYEVAEVLGRGGFSIVRRGVSKSEGKAAQQVAIKTLRRLGPATTTGGSTPPQQGSNKGGGLVPTWKQVSSISDALLTNEILVMRRIVEAVAPHPNVIALHDVYEDARGVHLVLELCSGGELFDRIVGRDRHYSEFDAAGVVRQIARGLQALHGAGVVHRDLKPENCLFADRGEASTLKVMDFGLSSVEDFSDPVVTLFGSIDYVSPEALSRQDVSAASDMWSVGVILYILLSGCPPFHAPTNREKQQRILQGEFSFQDHTWKTISSSAKELISSLLSVEPYKRPTASDLLGHPWVIGDCAKQDLMDAEVVTKLQRFNARRKLRAAAIASVLSSKVALRTKRLRNLLGRHDLSSEELDNLRAHFARICADGENATLAEFEQVLRAMRLEALVPLAPRVFDLFDNNRDGTVDMREILCGLSSLRNSRGDDALRLCFQMYDADRSGCISKDELASMLRALPEECLPGDITEPGKLDEVFDEMDANGDGKVSFEEFKAAMQKDSALQDVVLSSLRPPPPP

SEQ ID NO: 72269 - protein, 136 aa, Zea mays
  Clone ID: JC-ZMXLIB3526P092AH08_FLI.pep
KSLEAGVEDQEDVWVVRLRRVGVQERRDAAGAAGRGGEPEGAGVRADERGGAVGGGAGAAAGHAGLGALLREPQHRAAPQARRRRRPHHHPARLRQPPLHPHVRRRRQEPRPLQGRRRLAAASRISYDQTKQLATS

SEQ ID NO: 72270 - protein, 172 aa, Zea mays
  Clone ID: LIB3245-592-G4_FLI.pep
RRMTCWSGGYASSAGSATSTTPVCSSSTSAPPCTSSPYPVTSPASSWSTCTTSSSRPETSSRSVTPPLPDGLRGDASCCCVPISFVQARRTGWYWSPIAAVSTYVRMYCMFVIGTDRVLTCDLHGAARSCGCFLHAVLLCLPPNKCTRERRRRRRRRMLLIYPDLRVCSLTL

SEQ ID NO: 72271 - protein, 172 aa, Zea mays; identical to SEQ ID NO: 72270
  Clone ID: LIB189-024-G10_FLI.pep

SEQ ID NO: 72272 - protein, 136 aa, Zea mays; identical to SEQ ID NO: 72269
  Clone ID: LIB83-006-G9_FLI.pep

SEQ ID NO: 72273 - protein, 218 aa, Zea mays
  Clone ID: LIB3078-054-E12_FLI.pep
LDGTIRAWDLFRYRNFRTFTTPSPRQFVSLTADQSGEVICAGTLDSFEIFVWSMKTGRLLDVLSGHEGPVHGLMFSPINAILASSSWDKTVRLWDVFESKGAVETFQHSHDVLTLAYRPDGRQIACSTLDGLIHFWDPSDGLLMYTIEGRRDIAGGRLMTDRRSAANTSIGKYFTTLCYSADGSSILAGGNTKYICMYDVGEQVSKSFLARLYLYIEA

SEQ ID NO: 72274 - protein, 194 aa, Zea mays; identical to SEQ ID NO: 71944
  Clone ID: LIB3078-040-E10_FLI.pep

SEQ ID NO: 72275 - protein, 424 aa, Zea mays
  Clone ID: UC-ZMFLMO17242B08_FLI.pep
PSSTSKRREEGECEWTQEAAGEMKLNVKTLKGTNFEIEASPDASVAEVKRIIETTQGQSTYPADQQMLIYQGKILKDETTLESNGVAENSFLVIMLSKAKASSSGASTATAAKAPATPAQPAAPATSVARTPTQAPVATAETAPPSAQTQAAPAATAAASDDADVYSQAASNLVSGNNLEQTIQQILDMGGGTWERGTVVRALRAAYNNPERAIDYLYSGIPENVEAPPVARAPAAGQQTNQQAPSPAQPAAAPPVQSSAASARPNANPLNLFPQGVPSGGANPGVVPAAGSGALDALRQLPQFQALLQLVQANPQILQPMLQELGKQNPQILRLIQENQAEFVRLVNETPEGGPGGNILGQLAAAMPQSVTVTPEEREAIQRLEGMGFNRELVLEVFFACNKDEELAANYLLDHGHEFDEQQQ

SEQ ID NO: 72276 - protein, 556 aa, Glycine max
  Clone ID: 700553715_FLI.pep
ILDLSHNQLNGYFPDEFGSLTGLKVLNIAGNNFSGSLPTTIADMSSLDSLDISENHFTGPLPSNMPKGLQNFNASQNDLSGVVPEVLRKFPSSSFFPGNTKLHFPNGPPGSISSPAESSKRKHMNTIVKVIIIVSCVVALFILILLAVFIHYIRISRSPPEYETSKDIHRHPQPIISAPVRTTDGGGALVVSAEDLVTSRKESPSEIISSDEKMAAVTGFSPSKQSHFSWSPESGDSLSGENLARLDTRSPDRLVGELHFLDDTITLTPEELSRAPAEVLGRSSHGTSYKATLENGLLLRVKWLREGVAKQRKEFVKETKKFANIRHPNVVGLRGYYWGPTQHEKLILSDYISLGSLASFLYDRPGRKGPPLTWTQRLKIAVDVARGLNYLHFDRAVPHGNLKATNVLLDTTDMNARVADYCLHRLMTQAGTIEQILDAGVLGYCAPELAASKKPMPSFKSDVYAFGVILLELLTGRCAGDVISSEEGGVDLTDWVRLRVAEGRGSECFEATLMPEMSNPVVEKGMKEVLGIAMRCIRSISERPGIKTIYEDLSSI

SEQ ID NO: 72277 - protein, 204 aa, Zea mays
  Clone ID: 700219768_FLI.pep
NDSNPATPRASESSPRAIRIGEVGNQSPGMLTYDAEQDAVVSSGNSTPVSSPRFFNRRHSTGQSTPDRAGPSDIQSFSDSLKSRLNAVSMKYKESITKSTRGWKERLFSRNSSVADLGSEVRREVNAGIASVSRMMERLETRGNSRTSDSPAASTSEVPSATESSNERVTESNSAAAAAGGGTTTTGTSASNASAPCVATSGSN

SEQ ID NO: 72278 - protein, 197 aa, Zea mays; identical to SEQ ID NO: 43352
  Clone ID: 700221318_FLI.pep

SEQ ID NO: 72279 - protein, 197 aa, Zea mays; identical to SEQ ID NO: 43352
  Clone ID: 700167112_FLI.pep

SEQ ID NO: 72280 - protein, 289 aa, Zea mays
  Clone ID: 700381147_FLI.pep
RHRKMQALLLPARAAPPTPAMLRQRAVSASACASQVCRPLFGAASCISCGVHGSVRRHLTVAVAAAPPSPSSSPSSGPLYPTPPPTEQEVERVKLEQVMRRLEKTARYFKNLGTLGFWSQLVCTIISAGILAFSTVVTGKVTSPFTFYATAAGIAAAFISVFWSFGYIRLSERLRKTSKEPAKAPPRADVVKSLKNGIVVNILGMGAAVLGMQATVGALVAKALTTSAVPYYQAAGQSPVLALDVFLVQASANTILSHFLGVASSLELLRSVSLPPAEAAVPAPAPARA

SEQ ID NO: 72281 - protein, 696 aa, Zea mays; identical to SEQ ID NO: 71864
  Clone ID: 700382427_FLI.pep

SEQ ID NO: 72282 - protein, 256 aa, Glycine max
  Clone ID: 700730484_FLI.pep
VPDLVEKFIMAPLPAEQTGESAPTELQRSIPTPFLTKTYQLVDDPSADDLISWNEDGTSFIVWRPAEFARDLLPKYFKHNNFSSFVRQLNTYGFRKVVPDRWEFANDCFRRGERALLRDIQRRKLLPVPPAAAAPAAVTANTVTVAVAAPAVRTVSPTTSGDEQVLSSNSSPIAGNNNNNTVHRTTSCTTAPELLEENERLRKENIQLSNELSQLKGLCNNILSLMTNYASGFSRQQLESSTSAVRTVPVPDGKAP

SEQ ID NO: 72283 - protein, 89 aa, Zea mays
  Clone ID: LIB3159-021-E5_FLI.pep
LERERLTLLERREYIYVKNDVRSRRWVHIQHIPFYYTLLIRSPYTCNKLNTTVPSLCFSQHKLQIALVQISHHADLANALATHGCRIAW

SEQ ID NO: 72284 - protein, 283 aa, Zea mays; identical to SEQ ID NO: 53397
  Clone ID: 700049824_FLI.pep

SEQ ID NO: 72285 - protein, 266 aa, Zea mays
  Clone ID: 700433722_FLI.pep
KESEALQSRKVELEAKVGSLEAELSEAVARNHGLELEGHKLDVEMAATKAEVEKLHALLAEMDQKQIVVAAEVARLQSELDQVAMANEAAAGAHEAEKKMMEGELEMLKVNVDMVQAEKDSALVLVDAKNAEVGKLRDELKKLNSSMAALRALYDDLDGKSSFLHDEKVSVLKELEQEKAEAEKLKSKIQELESCNRDNVHEIGVLKAEVGGRDKQINDLNSELEQVQLAVADAERSGKNVVWTWLCPATTTVLAAASFVYAARSR

SEQ ID NO: 72286 - protein, 126 aa, Glycine max
  Clone ID: 700562593_FLI.pep
YFIYIYIFIFLFLVFHSSKSVSFTSHIIAMAARSYSPTMVALSLLLLVTFSNVAEAYTRSGTLRPSDCKPRCTYRCSATSHKKPCMFFCQKCCAKCLCVPPGTYGNKQVCPCYNSWKTKEGGPKCP

SEQ ID NO: 72287 - protein, 489 aa, Glycine max; identical to SEQ ID NO: 43983
  Clone ID: 700758170_FLI.pep

SEQ ID NO: 72288 - protein, 489 aa, Glycine max; identical to SEQ ID NO: 43983
  Clone ID: 700759479_FLI.pep

SEQ ID NO: 72289 - protein, 442 aa, Glycine max; identical to SEQ ID NO: 44712
  Clone ID: 700837726_FLI.pep

SEQ ID NO: 72290 - protein, 441 aa, Glycine max; identical to SEQ ID NO: 45632
  Clone ID: 700852486_FLI.pep

SEQ ID NO: 72291 - protein, 283 aa, Glycine max
  Clone ID: 700892495_FLI.pep
GHKKWITGISWEPVHLNAPCRRFVSASKDGDARIWDVSLKKCVMCLSGHTLAITCVKWGGDGVIYTGSQDCTIKVWETTQGKLIRELRGHGHWVNSLALSTEYVLRTGAFDHTGKQYSSPEEMKKVALERYQAMRGNAPERLVSGSDDFTMFLWEPFINKHPKTRMTGHQQLVNHVYFSPDGQWVASASFDKSVKLWNGTTGKFVTAFRGHVGPVYQISWSADSRLLLSGSKDSTLKVWDIRTRKLKQDLPGHADEVFSVDWSPDGEKVASGGKDKVLKLWMG

SEQ ID NO: 72292 - protein, 227 aa, Zea mays; identical to SEQ ID NO: 71982
  Clone ID: 700106946_FLI.pep

SEQ ID NO: 72293 - protein, 302 aa, Zea mays; identical to SEQ ID NO: 71942
  Clone ID: 700475148_FLI.pep

SEQ ID NO: 72294 - protein, 551 aa, Zea mays; identical to SEQ ID NO: 42233
  Clone ID: 700212586_FLI.pep

SEQ ID NO: 72295 - protein, 204 aa, Zea mays
  Clone ID: 700426539_FLI.pep
ASDSEKDMAISTANSIVSALNSYSKLTGLVVSRKRCDSIGIPALSSSLKLSLGRIKQSFVLTDSRLPDMPIIYASDAFTSLTGYSREEILGCNCKVLNGPGTSLEVLEEINQHICSEQACTVDLLSYRKDGSSFCDHLHVSPIRDTSGKVAFHIWVHLDMGAKHDFSGLTPEKWLLGAVGAVRVAVRGLSASGSLLRPPSQYQF

SEQ ID NO: 72296 - protein, 111 aa, Zea mays
  Clone ID: UC-ZMFLMO17075A08_FLI.pep
VWFVLNKTLQISTFLMSNTACLKHEQRSGGNRVVCYSVSLTLPLMCLCILILIFLEQFQYFLKDPVKYDVKYQVCFSWFSHSLTTSDPAPALPFLKVLGSVWFRSMVGHDS

SEQ ID NO: 72297 - protein, 189 aa, Zea mays; identical to SEQ ID NO: 72082
  Clone ID: 700216909_FLI.pep

SEQ ID NO: 72298 - protein, 220 aa, Zea mays
  Clone ID: 700236805_FLI.pep
ISETALVAEVHRLNADPAVHGILVQLPLPKHINEEKILSEISIEKDVDGFHPLNIGKLAMKGREPLFVPCTPKGCMELLSRSGVTVKGKRAVVVGRSNIVGLPVSLLLLKADATVSVVHSRTPDPESIVREADIVIAAAGQAMMIKGDWIKPGAAVIDVGTNSVDDPTRKSGYRLVGDVDFAAASKVAGYLTPVPGGVGPMTVAMLLKNTVDGAKRGIVE

SEQ ID NO: 72299 - protein, 106 aa, Zea mays; identical to SEQ ID NO: 69842
  Clone ID: 700242885_FLI.pep

SEQ ID NO: 72300 - protein, 536 aa, Zea mays
  Clone ID: 700047686_FLI.pep
SPLSCADSSFSSCHSPAAAAAGKIKSRQKAPKDQSSVKMACPRGRTPFPLCFFLMICLMAQLGASNVVLMANNTTLSLDDVEATFTPAVEGSGVSGVLYAVEPKDACSPLRAKAIQGSVSPFALIIRGGCQFDDKIRNAQNAGFKAAVVYNNEDNDILVSMAGSSLGVQIYAVFISKASGEELKKYSGQTDAELWIIPTYENSAWPIMAISFVSLLAMSAILVACFFARRHQIRRDRARLPRAQESHGMSSQLVKAIPSLIFTKVQEDNCTSATCAICLEDYSVGEKIRVLPCRHKFHAACVDLWLTSWRTFCPVCKRDASAGTSDPPVSESTPLLSSSATRLPESTVLASLRSTAAASPPRTISRHPLLRSISRNYSVSGSSILRTPDSRFDANSSICTSGSNLDLANVPSPWSGTWHRASAHSLCRGYLSPPIGIRNTSAHVSRSANGSPSRYVGSSRMSHGSSGQQHPHLRHCTLSGPSLFTMVPQSPQQNQLQHGGYSETNLSAAASAQSFRQLYLQHCPDSDTSSQSLPGC

SEQ ID NO: 72301 - protein, 400 aa, Zea mays; identical to SEQ ID NO: 71983
  Clone ID: 700346230_FLI.pep

SEQ ID NO: 72302 - protein, 306 aa, Zea mays; identical to SEQ ID NO: 42471
  Clone ID: LIB3245-310-C1_FLI.pep

SEQ ID NO: 72303 - protein, 553 aa, Zea mays; identical to SEQ ID NO: 58887
  Clone ID: UC-ZMFLMO17019F01_FLI.pep

SEQ ID NO: 72304 - protein, 349 aa, Zea mays
  Clone ID: LIB3069-008-A5_FLI.pep
SKMGGALLLALLLVSAAAAPQVLGVGNGDNHMRIIQEDIIETVNNHPSAGWTASRNPYFSNYTIAQFKHILGVKPAPQNALSNVPVKTYSRSLELPKEFDARSAWSRCSTIGNILDQGHCGSCWAFGAVECLQDRFCIHLNMSILLSVNDLLACCGFMCGDGCDGGYPIEAWRYFVQNGVVTDECDPYFDPVGCKHPGCEPAYPTPKCEKKCKEQNQVWQEKKHFSIDAYRINSDPHDIMAEVYKNGPVEVAFTVYEDFAHYKSGVYKHITGGIMGGHAVKLIGWGTSDAGEDYWLLANQWNRGWGDDGYFKIIRGKNECGIEEGVVAGMPSTKNMVPNFGGAVGRAIV

SEQ ID NO: 72305 - protein, 319 aa, Zea mays
  Clone ID: UC-ZMFLB73119E02_FLI.pep
PGSGSESEDDTFGRSYSYSSYDDLSPRLYSNSEAWDQDDGTGLEEHELYDDSNQIGSSTAPLSSYMGFEQMNLSDMKSDISLANIGDQNVIGTLQSCTVEELPNFDTLMSRSDDQNGETPIPHNLGNMTPDEDQLPPPPPLPPMQWRMTRQTTSLEEETCITTKDMLRKTSSLPHIHTSAQEEHCPPTAPLDLQGHAGEVGVQKTGGVREITNPPSIIDIKSSLLQQIRDKSEQLKLNGHERSKKAVGGDIKSLDEREELLQQIRSKTFNLRRTNASKADGSSQSTASSNVAAILEKANAIRQAVASDEGGDDDTWSDI

SEQ ID NO: 72306 - protein, 100 aa, Zea mays
  Clone ID: UC-ZMFLB73042E02_FLI.pep
KKKASRPVRPAYRNRLVLESFHTGGQLSDLILEAFRVAEEINEYLPLPPHLMGTIFKDLYLLGASLGYFFHRNFDLSVGIFHIIKCPHQWPRRQYWFCSS

SEQ ID NO: 72307 - protein, 181 aa, Zea mays; identical to SEQ ID NO: 71949
  Clone ID: 700321746_FLI.pep

SEQ ID NO: 72308 - protein, 437 aa, Zea mays
  Clone ID: UC-ZMFLB73037E10_FLI.pep
VNKQKPIWMRKPEEITKEEYAAFYKSLTNDWEEHLAVKHFSVEGQLEFKAVLFVPKRAPFDLFDTKKKQNNIKLYVRRVFIMDNCEELIPEWLSFVKGIVDSEDLPLNISRETLQQNKILKVIRKNLVKKCVELFFEIAENKEDYNKFYEAFSKNLKLGIHEDSQNRTKIAELLRYHSTKSGDELTSLKDYVTRMKEGQNDIYYITGESKKAVENSPFLEKLKKRGYEVLYMVDAIDEYAVGQLKEFEGKKLVSATKEGLKLDETEDEKKRKEELKEKFEGLCKVIKEVLGDKVEKVVVSDRVVDSPCCLVTGEYGWTANMERIMKAQALRDSSMAGYMSSKKTMEINPENPIMDELRKRAEADKNDKSVKDLVMLLFETALLTSGFSLDDPNTFGNRIHRMLKLGLSIDEDEPVEAEAEMPQLEDDAGESKMEEVD

SEQ ID NO: 72309 - protein, 437 aa, Zea mays; identical to SEQ ID NO: 72308
  Clone ID: UC-ZMFLB73055F06_FLI.pep

SEQ ID NO: 72310 - protein, 261 aa, Zea mays
  Clone ID: UC-ZMFLB73094H08_FLI.pep
VHLHPHLRLRRPGLRHGLQQADRRRPDDPGGPDRGGGGARVRAVRGGVGGREHLRRAREPGRDLRRLRGRQHHPVPRAPVLGGAAAGVHRGVLPAPLLDGRAGHGHLRADGRVGVGGAGAGDRDDLRAGVHGVRDGGGPEEGQPGHHRPHCHRLHRGGQHPGGRRLRRRVHEPRRVLRPRPRQLGVGLPVGVLGRPPHRRRPRRRHLRAALHLPHPRAAPLHRLLKAEADRPRGAQRSAASIQRSLPARRRLVSLVHVHAS

SEQ ID NO: 72311 - protein, 66 aa, Zea mays; identical to SEQ ID NO: 53435
  Clone ID: UC-ZMFLB73161C03_FLI.pep

SEQ ID NO: 72312 - protein, 121 aa, Zea mays
  Clone ID: 700353242_FLI.pep
AGTSVSGGGSGGASAGTSATVGAGVSGGAKVGGGVGGNAGGSGNVYTGTGADAGVSGGGSGGADGGIGANIGAGVFGGVKFGGGAGGSVGGSGSAAAGASGGSKSSGGGSDFGYGSASKEL

SEQ ID NO: 72313 - protein, 325 aa, Zea mays
  Clone ID: UC-ZMFLMO17132E01_FLI.pep
YIEQPLHPNLTTQSKTITTAGRAKQSPHMATGSSLVPLLLIAVAVAQIVGSQAGSISIYWGQNGGEGTLADTCATGNYRFVNLAFLAAFGNGQPPVLNLAGHCDPTNGGCASLSGDIKSCQSSGVKVMLSIGGGAGSYYLSSAADAKDVATYLWNNFLGGQSSSRPLGDAVLDGIDFDIEGGTNQHWDDLAKYLKGYSNSGRRVYLTAAPQCPFPDAWVGGALNTGLFDYVWVQFYNNPPCQYSSGSTTDLADAWKQWLSIPAKQIFLGLPASPQAAGSGFIPADDLKSQVLPLIKSSGKYGGIMLWSKYYDDQDGYSSSVKSDV

SEQ ID NO: 72314 - protein, 401 aa, Zea mays subsp. mexicana
  Clone ID: UC-ZMROTEOSINTE073C01_FLI.pep
AMVRTASLTCFAGMTSDVFFSLPENKRDYVTSSSVHAALNDMVPSVRSAACRAIGIVACFPQILSSSSLPGKFIDAIEFNTHNSSTPVRVTAAWALANLCSCIRFRALEVHTDPYAGVGVLSKSSISLLVEVALRLAKDSEKVKSNAVRALGYLSRFIRFNYHAGTINDPSDSVFYGDPVWLERMVQALMSCVTTGNVKVQWNVCHALSNLFMNDTLRLQDMPWASSVYSILLLLIRDSNNYKIKMHAAVALSVPVSRLDYDSSFPDVVRGLVHALESLNSNNSSLPSNFKQRDNLEKQLTFTALHLLSFVSPNDDPSLKDFLTKKSSFLEDWLRSLCASFNSSERQPLPTEATNDEDGFSPNVTQKGMLSSALQSLLGVYAGRTQQVITQRFEQLARSVA

SEQ ID NO: 72315 - protein, 286 aa, Zea mays
  Clone ID: UC-ZMFLB73047D11_FLI.pep
EGGVLKRAGHTEASVDLAMLAGLPPVAVLCEIVDDADGSMARLPKLRVFAERENLKIISIADLIRYRRKRDRLVERASVARLPSQWGNGHGYCYRSAIDGIEHLAMVKGDIGDGQDILVRVHSECLTGDIFRSARCDCGDQLAMAIEMIEKAGRGVIVYLRGHEGRGIGLGHKLRAYNLQDDGRDTVEANEELGLPVDSREYGIGAQILRDLGVRSMKLMTNSPAKYSGLKGYGLSIAGRVPLVTPITSENRKYLETKRTKMGHVYGLANAQVNQPSGSQSTEEKH

SEQ ID NO: 72316 - protein, 286 aa, Zea mays; identical to SEQ ID NO: 72315
  Clone ID: UC-ZMFLB73047D12_FLI.pep

SEQ ID NO: 72317 - protein, 401 aa, Zea mays subsp. mexicana; identical to SEQ ID NO: 72314
  Clone ID: UC-ZMROTEOSINTE073B06_FLI.pep

SEQ ID NO: 72318 - protein, 265 aa, Zea mays; identical to SEQ ID NO: 42272
  Clone ID: 700103108_FLI.pep

SEQ ID NO: 72319 - protein, 178 aa, Zea mays; identical to SEQ ID NO: 41250
  Clone ID: UC-ZMFLLIB3205468A05_FLI.pep

SEQ ID NO: 72320 - protein, 287 aa, Zea mays; identical to SEQ ID NO: 58142
  Clone ID: UC-ZMFLB73160F05_FLI.pep

SEQ ID NO: 72321 - protein, 353 aa, Zea mays; identical to SEQ ID NO: 53410
  Clone ID: LIB3689-209-D7_FLI.pep

SEQ ID NO: 72322 - protein, 272 aa, Glycine max
  Clone ID: 700877014_FLI.pep
SFFTLAFLATLIYTRDTTSSSSTTTSSTPLSSFANTPLPSTVINTLLHYASKSNDTFHMPHSDLKTISDVLRKCPSPCNFLIFGLTHETLLWKALNHNGRTVFIDENRYYAAYFEEKHPEIDAYDVQYTTKRSELKELIASTKEQVGNECRPVQNLLFSECKLGLNDLPNHVYEVDWDVILVDGPRGDWPEAPGRMSPIFTAGVLARSKKGGNPKTHVFVHDFSGKVEKVSGNEFLCKENLVEATHSLGHYVLEKMDDSSVQYCKNHSSGSA

SEQ ID NO: 72323 - protein, 285 aa, Glycine max; identical to SEQ ID NO: 72260
  Clone ID: 700698096_FLI.pep

SEQ ID NO: 72324 - protein, 234 aa, Zea mays
  Clone ID: LIB3597-073-E12_FLI.pep
SKLKPSNSSPCSSNFPPGFCPFVCAPHAAPRPSLTPAFPRSPWTRPLPRTRRPPAWPPPLRRWHRGTSPRCCRTRRRGVGRATAAHSRRSSSAAPRSPTTSPSTRTSALSGRPAWPATRMRRMTTTTRKGSAALAAAGCSRCSSRTVASSQDRRSRRRIRIRRRRGHGTITACLWMGPRLCLVPPPPGRLGGRALMPRRLFPTLSSPSSRLLTPNVPRGENLTTCGGELPLLYL

SEQ ID NO: 72325 - protein, 234 aa, Zea mays; identical to SEQ ID NO: 72324
  Clone ID: LIB3597-072-H12_FLI.pep

SEQ ID NO: 72326 - protein, 366 aa, Zea mays; identical to SEQ ID NO: 48474
  Clone ID: LIB3154-013-E5_FLI.pep

SEQ ID NO: 72327 - protein, 492 aa, Zea mays
  Clone ID: UC-ZMFLMO17070B03_FLI.pep
GRVVCRRPVPVGLAMRRARGRRGLLLLLGVALSAAALLRGCAGQQGEDGSDAPAAAAAETAPMEEKERRALYAAIESFVGKGWNGSGLYPDPCGWSPIQGVSCDLFNGLWYPTVMSIGPVLDNSLQCGPDAKFSAQLFDLRRLRTLSFYSCFPASNPTAIPTGSWEKLAGTLETLEFRTNPGLNGAIPASLGRLASLQSLVLVENNLTGPVPAELGALSRLRRLVLSGNGLSGPIPVTLGGLTGLLKMDLSSNLLQGSIPPELAGLRSLTLLDLRNNSLTGGLPQFVQGMASLQDLLLSNNPLGGGLPQSGWGALAGLATLDLSNVGLVGAIPGSMAALTGLRFLALDHNRLTGAVPPELARLPSIGALYLNGNNLTGTLEFSAGFYQRMGRRFASWDNPGLCYNVAAVDAAHAPSGVVVCKDLQEPSVGGGARDGDGDGDAEEDGTKPEAGSSLVASSSSGMPVGSVGGLRYLVVVRGMAAAVLGLVSLLQ

SEQ ID NO: 72328 - protein, 218 aa, Zea mays; identical to SEQ ID NO: 72273
  Clone ID: LIB3079-003-B1_FLI.pep

SEQ ID NO: 72329 - protein, 175 aa, Zea mays; identical to SEQ ID NO: 72248
  Clone ID: LIB3076-002-C4_FLI.pep

SEQ ID NO: 72330 - protein, 226 aa, Zea mays
  Clone ID: LIB3076-020-C8_FLI.pep
MMKSHAAIATDRYGSRAPPTISGKNGVERLGVGELLVGTLVGLDLLLEPGELDVAGHLAAVHLGEGDGMVQYGRLPVAHGQRVHRRVGRRVLERGDGQAAALRVHHRLVVRVLEPAVAQEVAVVAEVDDEGALHGLHGDPGPAAVARGLEAADEVLQQQRDGAGVGVALEPQREVRLRAPRVEVDHHLLVHVHAGPGQRLRVQAHGLREHAQEPARQRHQLLAVPL

SEQ ID NO: 72331 - protein, 165 aa, Zea mays; identical to SEQ ID NO: 53428
  Clone ID: LIB3069-035-C4_FLI.pep

SEQ ID NO: 72332 - protein, 250 aa, Zea mays
  Clone ID: UC-ZMFLMO17059E10_FLI.pep
QLIRARPAGSARRRRMEQYDGLFPPAYVDDSSSLLLVPNANGTAQEERPRARRRRRRAARCGGGGGELDGGGDHKKRRLTDEQVEMLELSFREERKLETGRKVHLAAELGLDPKQVAVWFQNRRARHKSKLLEEEFAKLKQAHDAAILHKCHLENEVMRLKDKLVLAEEELTRFRSAGNHAVSGDGGDVMARAVCSGSPSSSFSTGTCQQPGGGGGGGGDHLGDDDLLYVPDYAYADSSVVEWFSLYGLM

SEQ ID NO: 72333 - protein, 220 aa, Zea mays
  Clone ID: 700348544_FLI.pep
EQTSASLRKAKLFHKHRKTLSVRVGCLTVWYKQMNIIKVLIRCSCHHHNLTRHHHCSPLHHRNRRRIHHYDRLRFPFRRHRYLRSSNHRDHSYRLRLLQLHCRHQIRCHSHCSHQNRPRRQLRSHSQRHRCWSYLSRHGLHRMRRPPRNRTRTRRHLAKRHHRPRIHCHMRGQRLGTGHCRHRPRHRRSRSRIRSHSWFRSRRLHHLHRLVHLRWRGLPP

SEQ ID NO: 72334 - protein, 114 aa, Zea mays
  Clone ID: 700355876_FLI.pep
YVFCCSYAHNVAPKGKFIAFVSTEAETDKPEIELKPGIDLLGPVEETFFDIYDRYEPVNNPDDDCCFLTNSYDSTTHFETTVKDVLALYNKITGKELDLSVDLNAASATEQEAA

SEQ ID NO: 72335 - protein, 349 aa, Zea mays; identical to SEQ ID NO: 72304
  Clone ID: LIB3069-021-B11_FLI.pep

SEQ ID NO: 72336 - protein, 289 aa, Zea mays; identical to SEQ ID NO: 72280
  Clone ID: 700381026_FLI.pep

SEQ ID NO: 72337 - protein, 287 aa, Glycine max; identical to SEQ ID NO: 72251
  Clone ID: 700732134_FLI.pep

SEQ ID NO: 72338 - protein, 479 aa, Glycine max
  Clone ID: 700906134_FLI.pep
FFLPSKMEEKLKYPCLSSLLTLFLCISATSTNPHNSQTQTLLLHTLPDPPTLSWPESATVEPDPEPTTSLSLHHIDALSFNKTPSQLFHLRLERDAARVKTLTHLAAATNKTRPANPGSGFSSSVVSGLSQGSGEYFTRLGVGTPPKYLYMVLDTGSDVVWLQCKPCTKCYSQTDQIFDPSKSKSFAGIPCYSPLCRRLDSPGCSLKNNLCQYQVSYGDGSFTFGDFSTETLTFRRAAVSRVAIGCGHDNEGLFVGAAGLLGLGRGGLSFPTQTGTRFNNKFSYCLTDRTASAKPSSIVFGDSAVSRTARFTPLVKNPKLDTFYYVELLGISVGGAPVRGISASFFRLDSTGNGGVIIDSGTSVTRLTRPAYVSLRDAFRVGASHLKRAPEFSLFDTCYDLSGLSEVKVPTVVLHFRGADVSLPAANYLVPVDNSGSFCFAFAGTMSGLSIIGNIQQQGFRVVFDLAGSRVGFAPRGCA

SEQ ID NO: 72339 - protein, 287 aa, Glycine max; identical to SEQ ID NO: 72251
  Clone ID: 700731464_FLI.pep

SEQ ID NO: 72340 - protein, 272 aa, Glycine max; identical to SEQ ID NO: 72322
  Clone ID: 700872746_FLI.pep

SEQ ID NO: 72341 - protein, 347 aa, Zea mays
  Clone ID: UC-ZMFLMO17069B05_FLI.pep
CLPIRGKLYDVACVDDVLNTIASKVQQNIIHLVGDMVTEFFVAHTSSSLNQQQLMEVISQMSLKCPQEDAKWWYKFYFRLEVFLHFNKPFPFEEAASPEHVIVAESICKILRTFYRVIEVISASSSPTANMYFNEIWKVRTVLQEEASSEHAEITAMVAEMHETFNEYWQHSYLWLCIPVILDPRFKFGFIEFRLKRAFGLKSASYLSGIRETLQELFNEYCSPVDQPNVRVPKSESFSLDDNDSFEDWDQHLNEQASSQKSTELDNYLADGLVPRKDDFDNLNWWMCHATKYPTLAAIVQDILAMPASAVPSEAAFTSSGPVIPKHHSMLSIKTIEALVCTRDWMR

SEQ ID NO: 72342 - protein, 66 aa, Zea mays
  Clone ID: LIB3158-018-D11_FLI.pep
DRNQMISLGPTKSTEMLLPANNFLYIQKKHHRLLNTPSLTKRIKDVFRTEACTEYFPQDVPFSTLT

SEQ ID NO: 72343 - protein, 98 aa, Zea mays
  Clone ID: 700051368_FLI.pep
KQNGKALVLSRIAITAMYKYNASAASCVASLHYSVSYKQLMHRSRFRGCKQQAPPAAINKRGEKEQNRTSLKNSAAALVYSGTARPSVSLHVLVKPIS

SEQ ID NO: 72344 - protein, 61 aa, Zea mays
  Clone ID: 700094260_FLI.pep
HCWVSVVIYVSVFHLLPFQSHCYVPKGACQFGGLCAVSSVASYLVNTIGQNKRKCKLKFML

SEQ ID NO: 72345 - protein, 61 aa, Zea mays; identical to SEQ ID NO: 72344
  Clone ID: 700084182_FLI.pep

SEQ ID NO: 72346 - protein, 115 aa, Zea mays
  Clone ID: 700087440_FLI.pep
QEPNAETVAEKTEPPVASSTGIQEEVKRSSIEYWNERFNRLQTYLENCDHSTQEGYLRKLRSLSAAGRNMHAIELEKRAIHLLMEEGKELQRMKALNVLGKVSPNASSKLTPSQR

SEQ ID NO: 72347 - protein, 553 aa, Zea mays; identical to SEQ ID NO: 58887
  Clone ID: UC-ZMFLMO17084A11_FLI.pep

SEQ ID NO: 72348 - protein, 226 aa, Zea mays; identical to SEQ ID NO: 72330
  Clone ID: LIB3078-053-C1_FLI.pep

SEQ ID NO: 72349 - protein, 200 aa, Zea mays
  Clone ID: UC-ZMFLMO17185G10_FLI.pep
VTPLLACLRSGLDLGSIMEAYFLFHSGRAHEFAYAEQEEDIGSPSDSEPPSTSTSRESAGSSAELDDDATSSGSGSGSGSDRFEMSALMTQLPPFKRGLSRFFDGKSQSFASLAAVGSLEDLPKPARKRLKPSRSCGGALDAHRGRLLSPRRHYCTKPTARTRKAAARSGTLSVLAAGAPRMPPAVARAEGVAAKVLIVS

SEQ ID NO: 72350 - protein, 192 aa, Zea mays
  Clone ID: LIB36-009-H8_FLI.pep
TPGSPAFLSSPRPPVPPPRLPFLSRAKMNVEKLKKMAGAVRTGGKGSVRRKKKAVHKTTTTDDKRLQSTLKRIGVNSIPGIEEVNIFKDDVVIQFVNPKVQASIGANTWVVSGTPQTKKLQDLLPSIINQLGPDNLDNLRRLAEQFQKQASGASGAEAGASAGAVQDDDDDVPELVPGETFEEAAEEKKESS

SEQ ID NO: 72351 - protein, 165 aa, Zea mays
  Clone ID: UC-ZMFLB73178E05_FLI.pep
ANKVSARIRAHKADVNAVTFADETGNVLYSGSDDSLCKVWDRRCLSGEKSAGILTGHLDGVTFIDSRGDGRYFISNCKDQRIKLWDIRKMSSVVRSRPVSLVDWDYRWMPFPSEAHNLKHPGDQSVATYRGHSVLRTLIRCYFSPVHRGTYTRDPVTSLYIFMTW

SEQ ID NO: 72352 - protein, 372 aa, Zea mays; identical to SEQ ID NO: 51654
  Clone ID: 700205471_FLI.pep

SEQ ID NO: 72353 - protein, 536 aa, Zea mays
  Clone ID: 700074022_FLI.pep
PVGENRERGCLQAMKYNTRKDASGGGGGAPFAIPCVDIKSFVASLAFLTLFVVFWQLQPYGSVLTAARTSASPPCTLLPTTAAIDLASPDTTSSTAAKTDQPAAAAAVSATAAGANAAPVWLAKAARPARPEDPNKRVFRPYGSAAALFVQMGAYRGGPRTFAIVGLASKPTHVFGTPYFKCEWLPNPTAGDPSPRPVRTKAYKMLPDWGYGRVYTVVVVNCTFPSNPNARNAGGKLLVHAYYSTASRRHERFVALEEAPGSYDESRFSPPFQYDYLYCGSSLYGNLSASRVREWVAYHARFLGPRSHFVLHDAGGISPEVKAVLDPWVRAGRVTVQDIRAQAEYDGYYYNQFLVVNDCLHRYRHAANWTFFFDVDEYLYLPNGQKLAEVIGQLSGYSQFTIEQNPMSSKLCLQDPSRNYSREWGFEKLVFRNSITKVRRDRKYVIQGRNVYSAGVHMSQNLYGRTTHKTEGLIRYYHYHDSINVMGEPCREFVPMPANGSKTMFEGVPYVYDDNMKRLAGEIKRFEKVTLGSART

SEQ ID NO: 72354 - protein, 161 aa, Zea mays
  Clone ID: 700170628_FLI.pep
QSERSSMRSDRQTTDESQSDRQRRTYRTDSYRHEASSQYLVQGQPFGSTSSMRKQGNTSHGVYTPPSTSSNGPSALSGPPGPPFFMVYSYEQGSNHGATATSSEPIEFGSLGPLPAADGDDIPRSTRQIMPNGFYGQRRGPYRGGSSHSSPDQPSSPQPRR

SEQ ID NO: 72355 - protein, 569 aa, Zea mays
  Clone ID: UC-ZMFLMO17266G06_FLI.pep
ARRMWKDRVRLRRIKERQHKLALQQAELQKLRPKPISDQAMRKKMSRAHDGILKYMLKLMQVCNARGFVYGIIPDKGKPVSGASDNIRAWWKEKVKFDKNGPAAIEKYESDNLVSATAQSGGTKSQHSLMDLQDATLGSLLSSLMQHCDPPQRKYPLEKGASPPWWPSGKEEWWTALGLPSGQVPPYKKPHDLKKVWKAGVLTGVIKHMSPNFDKIRNHVRKSKCLQDKMTAKESLIWLGVLQREESLVHRIDNGVSEITQRSMPEERIADTNSSSNEYDVYGFEDAPVSTSSKDDEQDLSPVAQSAVEHVPKRGRERAYNKRPNQIVPGKAKEPPKRKRTRHSSTVTEPDAHRVVDAPENSRNLIPDMNRLDQVEIPGTSNQIVTFDHGGTTTEALQHRGDAQVQVHPPGAEVNSFYSAPTANPTPISIYMGDQPIPYQNNDSTRPRSENSFPVDAHTGLNNLPSSYQNLPPKQSLPLPMMDHHVVPMGIRAPTDSIPYGDHILGGGNSTSVPGDMQQLIDFPFYAEQDKFVGSSFEGLPLDYISISSPIPDIDDLLHDDDLMEYLGT

SEQ ID NO: 72356 - protein, 626 aa, Zea mays
  Clone ID: 700213387_FLI.pep
FNASGIVFMGDNMKPNLESGSINGEANGEDGAKADQKSSQQMGSHAAYPPWAMHPPSGAVVYPPYPMQGMPFYPGVNPYYPPYPPVDDPRYHYSGRKSSRKHSSDSKDSETLDVESDHCSSDRGSSHGRKSHRKGKRSGKKKPSVVVIKNVNVTSKKHGSSESESQSSSEVESADSDNSHSKSSERKHKSSSSKKKEGRRTTFASGDEYSKDEMSNGHDAEQGNWSAFQNFLLRAEEKTRSSDADLFAGEKEPPSRRKQNVNTADPILLAERDGGIVHERNIVGFDSANGRTRAIRVMSNDELVMSGEGRNYMHSEIKEIEAGGGRYRRGTGDDYMVYGQGSQIARHSLLDPLAEAQYKNPVQQDKNRNGVADESFMIPLRSSLHDNIGAESRTTIDIDVELPSRIHKASDEKAGHQLFYEPDELVPERGSEDVSFGYDPAMDYDSHMQTTVKVEDEKTEDDLPVADNDVQKVEKEKLRNAKDGSDKRRKDALLRRLSAPRTPLNDAQKRAQNLRAYKADLQKLKKEQEEEQIKRLERLKLERQKRIAARGNGKGPGNGSPKANGTNGLSKSVPTFTGLKKEKNGTTESLSDRLKRLSEPKSIAGAEHSLNPKSTGADHSRRRSMA

SEQ ID NO: 72357 - protein, 164 aa, Zea mays
  Clone ID: UC-ZMFLMO17371D02_FLI.pep
FTHCNQSFVKDCVGPAKESYERRMSKMLAKSRALFIKEYNNKLFNWLVTFSLVMVVIGRFVIKFFLLEIVAWVMFIFLETYTRMFWSAESLYYNPAWHIIVSSWEMIVYSPILDLDRWAIPIVIMLSLGVLYWRCFGRRRKRVKGSLLPLYKNSYKNSSRPRSD

SEQ ID NO: 72358 - protein, 432 aa, Zea mays
  Clone ID: UC-ZMFLMO17339C03_FLI.pep
PGRPLPHQGLDVVGDEEHGGSALPASAACRAHSGDAVVRRHTGGEHRRLPGPGLRPLLPALAPDGHRHHRQDGLRHRVRPVQERRRHRQQRQRVPRRRRGRGRGRRQGVPQGVQAVHGVRQDGPDELSVHHPRPLPPVRPDAVQAPAAAGARHGGLQDGPERAPPLLPHRRHHSRPPAGPGHAPALRPRRRPRPARLHRGAAGCDGERRRCRCQQGLRAGGQARARAGVRAPHRRHQDHGVHAVVSGVPGLVPPARGGQAAAGGGRLRAAPRARARAGRRRAPERVPLPRPGHQGGHAVPRRLAAHRQADLRAREDRRLRPPKGAYVWLAPGVLARDAAQFPDPEEFRPERFAPEAEEERARHPYAHIPFGVGPRACIGHKFALQQVKLAVVELYRRYVFRHSPSMESPIQFDFDLVLAFRHGVKLRAIRRG

SEQ ID NO: 72359 - protein, 685 aa, Zea mays
  Clone ID: UC-ZMFLB73279A11_FLI.pep
LLAIAEETLAEFMSKATGTAVNWVQMVGMKPGPDSVGIIAVSHNCSGVAARACGLVSLEPTKVAEILKDRASWYRDCRRVDILHVIPTGNGGTIELIYMQTYALTTLAEPRDFWTLRYTSGLDDGSLVICERSLTHSTGGPSGPKTPDFIRAEVLPSGYLIRPCDGGGSMIYIVDHVDLNACSVPEVLRPLYESPKILAQKMTAAALRHIRQIAHESSGETPYGAGRQPAVLRTFSQRLSRGFNDAVSGFPDDGWSSLLSSDGAEDISITINSSPNKLIGSDVSPSPFFSAMGGGIMCAKASMLLQNVPPALLVRFLREHRSEWADPGVDAYSAASLRANPYNVPGLRAGGFMGNQVILPLARTVEHEECLEVIRLQGHGFSHDEVLMSPDMFLLQLCSGIDEDAPGACAQLVFAPIDESFADDAPLLPSGFRVIPLDAKTDVPSATRTLDLASALEVGSGGGLCALSDSGSGTRSTRSVLTIAFQFSFENHLRESVAAMARQYVRAVMAIVQRVAMAISPSRLGPHVELKHPPGSPEALALASWIGRSYRAHTGTEIRWSDTEDAAGSPLTLFWKHSDAIICCSLKPAFTLKFANSAGFDILETTVANVQDLQLEAVLDDGGQKALVAQLPKIMLQGLAYLPGGVCRSSMGRQASYEQAVAWKVVGDDGAPQCLALMFVNWTFI

SEQ ID NO: 72360 - protein, 347 aa, Zea mays
  Clone ID: UC-ZMFLB73106D02_FLI.pep
PHVRLSRLHHRNLVKLIGICIERSTRCLVFELVPNGSVESHLHGSDKIYGPTDFDTRMKIALGAARGLAYLHEDANPHVIHRDFKASNVLLENDFTPKVADFGLAKEASDGMDHISTQVMGTFGYVAPEYAMTGHLLVKSDVYSYGVVLLELLSGRKPVDMTQPPGSENLVTWARPLLTTREGLQRLVDPSLPAGYDFEKLAKAAAIASMCVHVEASHRPFMGEVVQALKLIHSGGGGDETCSGSFVGGATEESPWNDVSRSSWNDDPPATPGPALPLGYGSDPAGADERRPRSASSAVLDKIESLAMYDWSGPLRTKGRGSFYRLRGSMSEHGRPSDDGSVEGYLM

SEQ ID NO: 72361 - protein, 421 aa, Zea mays; identical to SEQ ID NO: 64896
  Clone ID: UC-ZMFLMO17263H05_FLI.pep

SEQ ID NO: 72362 - protein, 261 aa, Zea mays
  Clone ID: UC-ZMFLB73172G06_FLI.pep
TKLRPGIWNFLQKASNLFELHLYTMGNKLYATEMAKVLDPTGTLFAGRVISRGDDGDPFDSDERVPKSKDLDGVLGMESAVVIIDDSVRVWPHNRHNLIVVERYTYFPCSRRQFGLPGPSLLEIDRDERPEDGTLASSLAVIERIHHNFFSHPNLNEADVRSILASEQRRILTGCRIVFSRVFPVGDASPHLHPLWQTAEQFGAVCTNLVDDRVTHIVANSPGTDKVNWALSKGKFVVHPGWVEASALLYRRANEHDFAVK

SEQ ID NO: 72363 - protein, 459 aa, Zea mays
  Clone ID: 700466358_FLI.pep
EPAERSPPPSAVSDSSRSSMEMDGVLQAADAKDWVYKGEGAANLILSYTGTSPSMLGKVLRLKKILKNKLQRAPSCIAFSSHEQLLWGHIPELVESVKQDCLAQAYAVHVMSQHLGANHVDGGVRVRVSRDFLELVEKNVLSSRPAGRVNASSIDNTADAALLIADHSLFSGNPKGSSCIAVEIKAKCGFLPSSEYISEDNTIKKQVTRYKMHQHLKFSQGEISKTSEYNPLDLFSGSKERICMAIKSLFSTPQNNLRIFVNGSLAFGGMGGGADSVHPADTLKCLEDLSKISGLKLPDFTELLSETIFRSEVLGNLLATQKLDDHDIEGVIHLYYNIISQPCLVCKNLTDVELLRKYTFLHSLPLDKSLKIVRDFLISATAKDCSLMISFRPRENGSTDSEHDSVFLESAKRTYEYKAYFLDLDVKPLDKMEHYFKLDQRIVNFYTRNGGGLAISKGQ

SEQ ID NO: 72364 - protein, 366 aa, Glycine max; identical to SEQ ID NO: 37097
  Clone ID: 700787908_FLI.pep

SEQ ID NO: 72365 - protein, 309 aa, Glycine max
  Clone ID: 700835245_FLI.pep
ASDSLSLTGSLQSVEELVGLSQLSPFQALIQRKISTSFNNSSLQFLDSVFFLARMAQHSNVPKFGNQESEDNVLDTAHSDKAQKGQSGSKMINPNDTKENSDIVSSADLPHSKPRVHSEDPSGKGSVRTTHELQKSREDGDPKQFTDSPARHGGGDSSHRGHGVGSADNRKRPSRQSTGPEHNIDRSPLHRQAKTPGRDSPSWEGKNSYDSSHGTPGRSRLRPSYRGDETPDEGAAVPKFGEWDESNPASADGYTHIFNKVREEKQVGAGHVPGTPNGRQYAARNQRANDKAQSCCFCWGKMIYVKHEL

SEQ ID NO: 72366 - protein, 373 aa, Glycine max
  Clone ID: 700870931_FLI.pep
PSILIRVSGVVSAVMGGFMICIIICCFRYKLLIQPIKLCSTTKSDQDIEAFLKNKGAVAQKRYKFSEVKKMTNSFKVKLGQGGFGAVYKGQLPTGCPVAVKLLNSSKGNGEEFTNEVASISRTSHVNIVTLLGFCLKGRKKALIYEFMANGSLDKFIYNRGPETIASLRWQNLYQISIGIARGLEYLHRGCNTRILHFDIKPHNILLDENFCPKISDFGLAKLCPRKESIISMSDTRGTLGYVAPEMWNRHFGGVSHKSDVYSYGMMLLEMVGGRKNIDAEASRTSEIYFPHLAYKRLELDNDLRPDEVMTTEENEIAKRMTIVGLWCIQTFPNDRPIMSRVIEMLEGSMNSLEMPPKPMLSSPTRSATESSS

SEQ ID NO: 72367 - protein, 202 aa, Glycine max
  Clone ID: 700877049_FLI.pep
LLNANCDLKVCDFGLARSAASTEDNQGFMTEYVATRWYRAPEIMLTFKEYTKAIDVWSVGCILAEMLSGKPLFPGKDYHHQLTLILDVLGTPTMEDYYGIKSRRAREYIRSLPFKKKVNWKMMFPKTTDLALDLLEKLLAFNPQKRITVEEALKHPYLEPYHDPEDEPTADPIPEEFFDFDKNKDDLSKDQLKQLIFDEIMR

SEQ ID NO: 72368 - protein, 363 aa, Glycine max
  Clone ID: UC-GMFLMINSOY065E09_FLI.pep
SIKEREREGMGDQVEGTVQNVLEQETLKWIFVGGKGGVGKTTCSSILSILLATVRSSVLIISTDPAHNLSDAFQQRFTKTPTLVNGFSNLYAMEVDPTVEHEDMGGADGMDSLFSELAGAIPGIDEAMSFAEMLKLVQTMDYSVIVFDTAPTGHTLRLLQFPSVLEKGLAKVMSLKNKFGGLFNQMTRMFGMGDDFGDDQILGRLEGMKDVIEQVNKQFKDPDMTTFVCVCIPEFLSLYETERLVQELTKFEIDTHNIIINQVIFDDEDVESKLLKARMKMQQKYLDQFYMLYDDFNITKLPLLPEEVTGVEALKAFSRHFTSPYQALCSKGDPVERLESKVSALQRQLHEAEEELERLKSGN

SEQ ID NO: 72369 - protein, 262 aa, Glycine max
  Clone ID: 701100933_FLI.pep
QVVGTSYELRAIYSASCFCFNKMETKSSSSSTNLVDQSVCPGDVILDLSNMTNQTIKLGGGLRQDCDAISVMKAGRLRFSKPNKYWVENSQKRYVPHAEDSVLGIVVDSRSDNFLVDIKGPALAFLPVLAFEGGTRRNIPRFEIGTLIYARVVKANPGMNPELACTDASGKAAEFGALKDGYMFECTTGLSRMLLSSPTCPVLDALGKKLSFEIAVGLNGRVWVSAASPQTTIVVANAIMNSETLSGAQQRIMVEKLLERIH

SEQ ID NO: 72370 - protein, 408 aa, Glycine max
  Clone ID: 701101241_FLI.pep
SNHSLEAAKVAVTSFVRSTFSHLLQDISDSLLQILKKDGAEQCTLDVVLDASTKAVLQGGLNVLLDFRKVLDDDSGILVRLRELITDWVQEGLQDFFRQLEDQFLLFSGRNNSSIQVHALAEGAQGYKAFAGLVLVLAQLSVFIEQTVIPKVTEEIAASFSGGSVRGYESGPAFVPGEICRKFRSAGEKFLHLYVNMRTQRVSLLLKKRFTTPNWVKHKEPRDVHMFVDLFLQELEVIVNEVKQTLPQGRRKHHRTDSNGSSVSSRSNPLREEKLGRSNTQRARSQLFETHLAKLFKQKVEIFTKVEYTQESVVTTIVKLGLKSLQEFVRLQTFNRSGFQQIQLDIQFLRIPLREIVEDEAAIDFLLDEVIVATAERCLDPIPLEPPILDKLIRAKLAKTEELNTISS

SEQ ID NO: 72371 - protein, 62 aa, Glycine max
  Clone ID: 701065177_FLI.pep
FDGLQKLQAARKTAENAINLKRVDDQVNKAVIAASKAATAARVAAVKAVQNRMDGKFCDTDV

SEQ ID NO: 72372 - protein, 174 aa, Glycine max
  Clone ID: 701069261_FLI.pep
KSRFVNRVVSSMFNTVATKKIAILGFAFKKDTGDTRETPAIDVCKGLLGDKARLSIYDPQVTEDQIQRDLWMNKFDWDHPIHLQPTSPTTEKKVSVVWDAYEATKDADGVCILTEWDEFKSLDYQKVYDNMRKPAFVFDGRNIVDVEKLREIGFIVYSIGKPLDPWLKDMPAVA

SEQ ID NO: 72373 - protein, 289 aa, Glycine max
  Clone ID: 701070093_FLI.pep
AGYNPEALLKRLPPDALYEEHAILLGKMNRHELALSLYVLKLNAPELALSYCDRVYESMHQPSAKNSSNIYLVLLQIYLNPRRTTAGFENRITNLLSPQNKTIPKLTPTPSIKSRGRGSKKIAAIEGAEDTKVSLSSTDSGRSDGDADEYNDGSPTIMLDEILDLLSRRWDRINGAQALKLLPKETKLQDLLSFLGPLLRKSSEMYRNCSVIKSLRQSENLQVKDELYSQRKEVVKITGDSMCSLCHKKIGTSVFAVYPNGSTLVHFVCFRDSQNMKAVGKGSQLRKRL

SEQ ID NO: 72374 - protein, 326 aa, Glycine max
  Clone ID: 701070153_FLI.pep
SITIALVELRDLIMDKYEAVKDLGAGNFGVARLMRNKETKELVAMKYIERGQKIDENVAREIINHRSLRHPNIIRFKEVVLTPTHLAIVMEYAAGGELFERICNAGRFSEDEARYFFQQLISGVHYCHAMQICHRDLKLENTLLDGSPAPRLKICDFGYSKSSLLHSRPKSTVGTPAYIAPEVLSRREYDGKLADVWSCGVTLYVMLVGAYPFEDQDDPRNFRKTIQRIMAVQYKIPDYVHISQDCRHLLSRIFVANPLRRISLKEIKSHPWFLKNLPRELTESAQAVYYQRGNPSFSIQSVEEIMKIVGEARDPPPVSRPVKGFG

SEQ ID NO: 72375 - protein, 284 aa, Glycine max
  Clone ID: 701106150_FLI.pep
SSWHEKELKADYDTTNSSPVLKTPSPMEKQAASLYTRKIFMKFQEELVETLANPAIKIDDSGTITTYRVAKFGENQKSHVVTFNSFEMKASCSCQMFEFSGIICRHILSVFRAKNVLTLPSQYVLTCWTRNAKTGTLLDEHASELPSTSRESVPVCYNNLRQEAIKYVEEGAKSIQIYHVAMRALKEAAKKVCTIKNQSSGTAEGATATNGSRGELLVADEDVPSNQSVAEKQKKIGELTAELEATNQRCEVYRANLLAVLKDMEEQKLKLSVKVQNARLSLKE

SEQ ID NO: 72376 - protein, 368 aa, Glycine max
  Clone ID: 701108250_FLI.pep
NSHTDKSQQQVSVVPMASATPLLKDELDIVIPTIRNLDFLEMWRPFFEPYHLIIVQDGDPSKIIKVPEGFDYELYNRNDINRILGPKANCISFKDSACRCFGYMVSKKKYIYTIDDDCFVATDPSGHKINALKQHIENLLCPSTPYFFNTLYEPFREGADFVRGYPFSLREGVPTAVSHGLWLNIPDYDAPTQLVKPLERNTRYVDAILTIPKGTLFPMCGMNLAFDRDLIGAAMYFGLMGDGQPIGRYDDMWAGWCCKVICDHLGLGIKTGLPYIYHSKASNPFVNLRKEYKGIFWQEDIIPFFQSIVLPKEATTVQKCYIELAKQVKEKLSKVDPYFDKLADAMVTWIEAWDELNPAGASVANGKA

SEQ ID NO: 72377 - protein, 101 aa, Glycine max
  Clone ID: 701108251_FLI.pep
HLNHPSSDTCINEQACSLQDVQITLGRLTPTAYPSEYASLRVDIFYIDGELWFNIKFEWNFICGWVFLHTYLCTNSKLVKLKHSHWSIPYDGLGSIQCFTE

SEQ ID NO: 72378 - protein, 185 aa, Glycine max; identical to SEQ ID NO: 54639
  Clone ID: 701108344_FLI.pep

SEQ ID NO: 72379 - protein, 274 aa, Glycine max
  Clone ID: 701118848_FLI.pep
LLEAHSGAGRVHARFGFGKKKAPAPKKASRGSGRDTDRPLWYPGAKAPEYLDGSLVGDYGFDPFGLGKPAEYLQFELDSLDQNLAKNVAGDIIGTRTELADVKSTPFQPYSEVFGLQRFRECELIHGRWAMLATLGALTVEWLTGVTWQDAGKVELVEGSSYLGQPLPFSITTLIWIEVLVIGYIEFQRNAELDPEKRLYPGGSYFDPLGLASDPEKKATLQLAEIKHARLAMVGFLGFAVQAAATGKGPLNNWATHLSDPLHTTIIDTFSSSS

SEQ ID NO: 72380 - protein, 127 aa, Glycine max
  Clone ID: 701121147_FLI.pep
SDFLLLLEFGVLRDESVYDPTVNSSLIELKHAASSTPIGLWGTNDAKLVPKLAESWIKDKSLINSRHFKILSFPTMKKHVKVLSISSACISLDTEIATAAAISEGLNSKKLIPILISQQAPHYSSRT

SEQ ID NO: 72381 - protein, 150 aa, Glycine max
  Clone ID: 701123845_FLI.pep
LKLTFEGKNQLIYPETWFFMLVVAICVIMQMNYLNKALDTFNTAIVSPIYYVMFTTLTILASVIMFKDWDGQSGGTIVSEICGFIVVLSGTIMLHATKDFERSSSFRGSAPSSPTLSARLFTGNGDSLLKQDEENGSPESNMCSRRQELY

SEQ ID NO: 72382 - protein, 110 aa, Glycine max
  Clone ID: 701123978_FLI.pep
LKGIIKGTGYLCSCDNCNQSKALNAYEFERHAGAKTKHPNNHIYFENGKTIYAVVQELKNTPQDMLFDAIQNVTGSTINQKNFRIWKASYQAATRELQRIYGKDDVVIPS

SEQ ID NO: 72383 - protein, 285 aa, Glycine max
  Clone ID: 701123993_FLI.pep
QSAMAGIRMIDIAVNFTDGMFKGIYHGKQCHVSDIATVLNRAWAAGVTRIIVTGGSLEESREALAIAETDGRLFCTVGVHPTRCKEFEESGDPEKHFQALLSLAKEGIQKGKVVAIGECGLDYDRLHFCPAEIQKKFTAGVTHSFTGSMDDCIKLLSFDKMYIGINGCSLKTTENLDVVKGIPVERMMIETDSPYCEIKNTHAGIGFVKSTWPSKKKEKYDQECIVKGRNEPCLVKQVLEVVAGCKGINDVSNLSRTLYHNTCRIFFPHDLDSAADALLAGGNST

SEQ ID NO: 72384 - protein, 109 aa, Glycine max
  Clone ID: 701124153_FLI.pep
ETRFISQKPPKVILSSMEVVAQSMGFKTHIRNYKMRIESISTNKASYFSVILEVFEIAPTFFMVDIQKAAGDAGEYLKFYKNFSSNLEDIMWKPPHETSKLRNSKTKGQ

SEQ ID NO: 72385 - protein, 285 aa, Glycine max
  Clone ID: 701126379_FLI.pep
LKSSVVAVFIANEENSAITGVGVDALVKDGLLNKLKDGPLYWIDTADKQPCVGTGGMIPWKLHVTGRLFHSGLAHKAINALELAMDALKEIQLRFYSDFPPHPQEQVYGFATPSTLKPTQWSYPGGGINQIPGECTISGDVRLTPFYNVKDVMKKLQEYVDDINESAQKLESRGPVSKYVLPDENIRGRLTLSFDEALSGVACDLNSRGFHVLCKATEEVVGYVKPYSITGSLPLIRELQEEGFDVQTSGYGLMATYHAQNEYCLFTDMSQGYRVFARIISQLEE

SEQ ID NO: 72386 - protein, 247 aa, Glycine max
  Clone ID: 701126530_FLI.pep
PIRTLILQLTSLITLVKSCNYKLTRLSIVDMECVVQGIIETQHVEALEILLQGLCGVQRERLRIHEICLKSGPHLGTVASEVRLLCDLEQAEPSWTVKHVGGAMRGAGAEQISVLVRSMVESKTSKNALRMFYTLGYKLDHELLRVGFSFNFHRGAQITVTVSSINKMLKLHATDEAVPVTPGIQMVEVTAPATAETYAEVASAVSSFCEYLAPLLHLSKPGISTGVVPTAAAAAASLMSDGGGTNL

SEQ ID NO: 72387 - protein, 374 aa, Glycine max
  Clone ID: 701127294_FLI.pep
LLIKFNSMTNQSSSPSLLCASFNQDHSYFAVGTRDGVRIFDANTGRLCYERAVGAFVIAEMLFSSNLLAIVGAGHQPSLSPRRLCLFNTTTGAALRELNFLTSILAVRMNRQRLIVILQDKAYIYEINSLTILDTIDTVPNIKGLCAFSPSLDACYLALPASTTKGSALLYNVMECHLHCEIEAHRSPLAAMVLSSNGMYIATASEQGTIIRVHLVSDATKSYSFRRGTYPSTIFSVSFGPSKRLPDILAASSSSGSIHLFTLGFASRPSSKRSSGFLGSIIPDAVHDVLDPAHHHVLHNAVPAGVKSYAVIRKVENVTNSSSSELLACRAIMSVITYNGYFQEYNLSIDAHNELSWSLGRQFNLLTVTMDKAS

SEQ ID NO: 72388 - protein, 210 aa, Glycine max
  Clone ID: 701129470_FLI.pep
TIEDDKTIIPRNSLVEVNQSGLLMETIIDITPRDPIPTPSAGPLDQECSREALIVCDREKIKGIEGVSLDKLVGIFTRLGQDVEKIGIANSYSLAERAASIIEEAKPLLIKMKAMAEDVQPLLTEVRDSGLLKEVETLTQSLTQATEDLRRVHSSIMTPENTELLQKSIYTLIFTLKNIENVSSDILGFTGDEATRKSLKLLIKSLSRLL

SEQ ID NO: 72389 - protein, 228 aa, Glycine max
  Clone ID: 701129550_FLI.pep
ATTEPEHRRDENDDDSVTAEDEDTGAQVAPIVKLEEVAVTTGEEDEDPILDLKAKLYRFDKEGNQWKERGGGNVKLLKHKVTGKVRLVMRQSKTLKICANHLVHHSLTVQEHSGNEKSCVWHASDFADGELKDELFCIRFPSVENCKAFMTTMQEVAESQGEGEENKDASATADLLEKLTVGEDKSDEKEPEKVQITKKLTVGEDKSEDEEPEMATNTNEKGEHDVEA

SEQ ID NO: 72390 - protein, 267 aa, Glycine max
  Clone ID: 701134909_FLI.pep
LVMSLSVLFTLGLARESHARDEDFWHAVWPNTPIPSSLRDLLKPGPASVEIDDHPMQIEETQYPKTFFYKEDLHPGKTMKVQFSKPPFQQPWGVGTWLKEIKDTTKEGYSFEELCIKKEAIEGEEKFCAKSLGTVIGFAISKLGKNIQVLSSSFVNKQDQYTVEGVQNLGDKAVMCHRLNFRTAVFYCHEVRETTAFMVPLVAGDGTKTQALAICHSNTSGMNHQMLHQLMGVDPGTNPVCHFLGSKAILWVPNLSVDTAYQTNIVA

SEQ ID NO: 72391 - protein, 61 aa, Glycine max
  Clone ID: 701135235_FLI.pep
ANCIKCKKLWIYHISSYFKLYDRAVLSLICLLSGLVLFVFIFICGFAFVGSGLELIIHNNE

SEQ ID NO: 72392 - protein, 176 aa, Zea mays
  Clone ID: 700444247_FLI.pep
RQVRQGLRDEGHRHQHVRQQAPGGHREPRRGRVPHQPGRGPDEGGDGDHGRHHRHGVGVAPDHAAAGAAEAAGADGDRGRAEQAARAAGLRHRAGREGRGWEQCRQRQGLPGHARVRGEARHRGRGRGHQDGLRQHGHGAAREERRPLPLRHRRRRQPRLCRLGMAAKVSIRAQPQ

SEQ ID NO: 72393 - protein, 304 aa, Zea mays
  Clone ID: 700211779_FLI.pep
CFSSTFATGETSPPRPSPPPSPAPVSPPTPAPASSEAKSEQEEAESASESGSMTLAIVLAKTEDATPPKASSAEASPTRSPQKESAVTIAKLLSAEDLAAMEAKATPDKVTPPSDAGSLAAAAAVTTVGGVSGGVGSKRWLLGGVPEKVRRAELRRAELGFRVSAAVFCLVALSVMAADTTTGWSGDSFRRYNEYRYVLAASVVTFTYCGFQLVAEVHYVVTGRHMIRAPFRSYFNLAMDQMLAYLLLSASSAALSRNGVWMSRFGGDQFTKLINVSASMAFLAFIALGLNSVISAYCFFSLVS

SEQ ID NO: 72394 - protein, 174 aa, Zea mays
  Clone ID: 700213744_FLI.pep
VLKINFLLGDSTRLPAMAENLAPEKRHTFVHNGQKVFEWDQTLEEVNMYIELPKGVPTKLFHCTIQASHVEVGIRGNPPYLNHDLMHPVKTDSSFWTIEDAEMHITLQKREKGKTWSSPIQGQGILDPYAADQEQKRLMLQRFQEENPGFDFSQAQFSGTCPDPRTFMGGIRSE

SEQ ID NO: 72395 - protein, 87 aa, Glycine max
  Clone ID: 701121174_FLI.pep
VCFFSHLKMSCCGGNCGCGSSCKCGNGCGGCKMYPDLSYTESTTTETLVMGVAPVKAQFEGAEMGVPAENDGCKCGPNCSCNPCTCK

SEQ ID NO: 72396 - protein, 82 aa, Glycine max
  Clone ID: 701121184_FLI.pep
KRFQNLLEFYHLEFINFVVLHKDKKPIKKKRQETNNTILSYPKPIKYTDTCPSIFLQPCVLDNSLHLNRLESHRSGTCWSNI

SEQ ID NO: 72397 - protein, 171 aa, Glycine max
  Clone ID: 701128782_FLI.pep
ISLQSPKFLISAKKNQKMSLIPGFFGGRRSNVFDPFSLDMWDPFKDFHVPTSSVSAENSAFVSTRVDWKETPEAHVFKADIPGLKKEEVKVQIEDDRVLQISGERNVEKEDKNDTWHRVERSSGKFTRRFRLPENAKVNEVKASMENGVLTVTVPKEEVKKPDVKAIEISG

SEQ ID NO: 72398 - protein, 81 aa, Glycine max
  Clone ID: 701069104_FLI.pep
DKLADKLESDEKEKIETAVKEALEWLDDNQSMEKEDYEEKLKEVEAVCNPIISAVYQRSGGAPGGGGASGEEDEDDSHDEL

SEQ ID NO: 72399 - protein, 109 aa, Glycine max
  Clone ID: 701069313_FLI.pep
VLEELNEIRRNGDEIVEREGPKTIIGGCIDREGSSDMPSAFLCPILQEAMTNPHVAADGFSYELEAIEHWLQSGRDTSPMTNLRLKHTFLTPNHTLRSLIQDWQTNKST

SEQ ID NO: 72400 - protein, 168 aa, Zea mays subsp. mexicana
  Clone ID: UC-ZMROTEOSINTE082B11_FLI.pep
VCWRSSNMVIDATNKGNRSRFINHSCEPNTAMQKWTVDGETRVGIFALRDIKIGEELTYDYKFVQFGAAQVCHCGSSNCRKMLGTTKYSGSSQNHHAKKKKRKTSCENCIQQFLRLWHPHKKMYVGCWIIDFDQETKMHTLKFNDLHTEKFNLKEEEWHFLEVDFDED

SEQ ID NO: 72401 - protein, 1266 aa, Zea mays
  Clone ID: UC-ZMFLB73009C12_FLI.pep
VKREGKRLNRDLLRIAPVYIGGSSENEKSYRGWESVAGLSDVIQSMKEVVMLPLLYPEFFSSLGLTPPRGVLLHGHPGTGKTLVVRALIGACSQGNRRIAYFARKGADCLGKYVGDAERQLRLLFQVAERCQPSIIFFDEIDGLAPCRSRQQDQTHNSVVATLLSLLDGLKSRGSVVVIGATNRPDAIDPALRRPGRFDREIYFPLPTFEDRSAILSLHTKKWPSPISGAFLSFVASQTVGYAGADLQAICTQAAINALKRTCPLHQILQYAEKGVPHGRVPLPTVLVEDKDWLAALAAAPPPCSKREAGIASNDLVSTPLDSCFVPSLFKPLVHLLISMYLDERVWLPPSLLKACCSIKEVVFSSMEKNTVPHTLWPTYLSSLIQQKDIADRIGTILSSCGLISAQLGNRGSMLLSDVKTQENFCGSRLNPTGLHMKGGLPHKLSGFRVLVAGAPRSGQQHLIRCVLHGFMGQIVIHKLDLATMVQEGNGDILSGLTHILLKCLNLGRCIIYMPRIDLWAVDKAHNQIEDNMLNTGSGRLASSTADHKKCSEVWNALIEQMDSLLASVSISVLSTSDMRFQDLPSGVRGFFSTHVVDQCLVSSEHTIPRFSVNIDNHSNWDEMVDSCALQLSHDLIRHHVQFLHDESHKNDNHQQKEVFASMNISAEGELKSSENERPLCGVASKENPIQLAAGRAQQEPPPSNVEDKVENDQFFFEGIVQRNPSSRLVKGSESFAIVAFGIQILQHPQFSKLCWATSKLREGPCTDINGPWKGWPFNSCLLQSSTLPGKSLNGGDNVVKGKEKSVCVRGLVAVGLLAYRGVYGSVIEVCAEVRKVLGLLVGQIQTKILEKRNQFRYFRILSQVAYLDDIVNSWAYTYQRTHVDTRTGTSRMKSSSAKECQRTKYAAGTNVQVAPVAIPAEVQDIPAQHTQDHEVVPGPTEVQGNPVKHTAEQPGSYSMDCDLDNHVNSVSSKDAVEHDHVHSALPDVHRGNTHADTVTNDGEPIGANNNGKVSRLTYGEDKFRPGIQRSENHTESMEGLSCLQRAGDSVGSPASINNTELPKNNVSSEAHIDDNELRRNDLVNDVESNSIDGKHDTMMNLSVPKISCLYKCCSPCFQSIYKMVHGIISNTLRPNLHCLTADDMHDILSSWCLNLLGSVRKLYSSHDEASCTEVFVRMSNKETHLEHCACQSDIYLSRECVCHLESNGDVETANTDCHPLSGQSLSFFFKDGVWMPLDLTAETKLHCSFRRFCVCSILGTVSMLS

SEQ ID NO: 72402 - protein, 410 aa, Glycine max
  Clone ID: 700834515_FLI.pep
IWRDYRGDVSALDAERFFTKLIEKQADPQAQDPVVHDNGVTYMFIQHSNVYLMIATRQNCNAASLLFFLHRIVDVFKHYFEELEEESLRDNFVVVYELLDEIMDFGYPQYTEAQILSEFIKTDAYRMEVTQRPPMAVTNAVSWRSEGINYKKNEVFLDVVESVNILVNSNGQIIRSDVVGALKMRTYLSGMPECKLGLNDRVLLEAQGRTTKGKAIDLEDIKFHQCVRLARFENDRTISFIPPDGSFDLMTYRLSTQVKPLIWVEASVEKHSKSRIEIMVKARSQFKERSTATNVEIELPVPVDATNPNVRTSMGSASYAPEKDALIWKIRSFPGGKEYMLRAEFRLPSITDEEATPERKAPIRVKFEIPYFTVSGIQVRYLKVIEKSGYQALPWVRYITMAGEYELRLI

SEQ ID NO: 72403 - protein, 541 aa, Glycine max
  Clone ID: UC-GMFLMINSOY047B09_FLI.pep
GVWWLWLFFTKFKPDFQDELGCKVGENVEEMVSGCRISNADGPPETGLNDLKLCQYSHREASDDNYLYCPASDDIKTDGIDNFRKHWKTGEPIIVKQVFDGSSISSWDPMVIWRGILETIDEKAKDENRMVKAIDCLDGSEIDIELAQFMKGYFEGLILENGWPQLLKLKDWPSPSASEEFLLYQRPEFISKLPLLQYIHSKWGLLNVAAKLPHYSLQNDVGPKIYISYGISDELGRGDSVTNLHFNMRDMVYLLVHTNEVKLKDWQRTKIEMMQKAKANKEFEAKESHGDPQISSRGSSPDSSLGTKSSGLEIDSNQNKSIMDQGFEIYSSAEGNTANCKLPFNQNGDVSEKTHPGVLWDVFRRQDVPILTKYLKIHWKEFGKSDDLGNEFVEWPLYDGAIFLDKHHKRKLKEEFGVEPWSFEQNLGEAIFVPAGCPFQARNVQSNVQLGLDFLSPESVGDAVRLAEEIRCVPNEHEAKLQVLEVGKISLYAASSAIKEVQKLVLDPKLGAQIGYGDPNLTAMVSENYEKMVKRRQITCA

SEQ ID NO: 72404 - protein, 381 aa, Zea mays
  Clone ID: LIB3062-046-H12_FLI.pep
ELREDPQSMVKQLLTKCAEALSEERIEEFLNLVQQARGVVSITGEPIQRLGAYLLEGLVARHANSGTNIYRALKCREPESNELLSYMKILYNICPYLKFGYMAANGAIAEALRNEDRIHIIDFQIAQGTQWITLIQALAARPGGPPHVRITGIDDPVSEYARGEGLDLVGKMLKSMSEEFRIPLEFTPLPGIYATQVTKEMLDIRSGEALAVNFTLQLHHTPDESVDVNNPRDGLLRMVKGLSPKVTTLVEQESHTNTTPFLMRFTETLDYYSAMSESIDTNLPRDNKERINVEQHCLAKDIVNIIACEGKDRVERHELLGKWRSRLTMAGFRPYPLSSYVNSVIRKLLACYSDKYTLEEKDGAMLLGWKNRKLISASAWH

SEQ ID NO: 72405 - protein, 288 aa, Zea mays
  Clone ID: 700221747_FLI.pep
KSSFCPLPSHRNKPSVSKREPNPKFPIPQRKEDSSASRLPAPNRSRRPDPRKQVVVLLHRPPAAMSFIFGKKKTPAELLRENKRMLDKSIREIERERQGLQAQEKKLINEIKKVAKQGQMGAVKIMAKDLIRTRHQITKFYALKSQLQGVSLRIQTLKSTQAMGEAMKGVTKAMGQMNRQMNLPALQKIMREFEMQNEKMEMVSEVMNDAIDDALEGDEEEEETEELVSQVLDEIGIDINSELVKAPATAVAKPVAAGKVPAQAEAAGGPDGGIDDDLQARLDNLRKM

SEQ ID NO: 72406 - protein, 164 aa, Zea mays
  Clone ID: 701177610_FLI.pep
TLAASCSSIITWIYPLLYAAPNSKCRQLTTFYFSEYFSFISACLRKCAGLLETALEGAVLDELLQVRVSADVLLGEEDVGDGSLAGDLEEGVLEVVTVVSVVQLDDFVVGLALVEGGLGGLAVGAPRLGEDHDVVAVDDALDFLDVGHFCFGTESCCGSEKGSD

SEQ ID NO: 72407 - protein, 585 aa, Glycine max; identical to SEQ ID NO: 45583
  Clone ID: 701134503_FLI.pep

SEQ ID NO: 72408 - protein, 181 aa, Glycine max
  Clone ID: 701101125_FLI.pep
KVETLASGIAQLGFFLVKRVSSEFMAKLYVKAVPPADLNRNTEWFTYPGVWTTYILILFFSWILVLSVFGCSPGIAWTIVNLAHFAVTYHFFHWKKGTPFAEDQGIYNRLTWWEQVDNGKQLTRNRKFLTVVPLVLYLIASHTTDYQNPMLLFNTVAVIVLVVAKFPHMHKVRIFGINADK

SEQ ID NO: 72409 - protein, 337 aa, Glycine max
  Clone ID: 701065355_FLI.pep
CRCTDPGLLLPRANLTFWRNGSLVRERNAMLPTISSKDWLDIDFGISEGVDFIAISFVKSAEVITHLKSYIAARSRDSDISVIAKIESIDSLKNLEEIVLAADGAMVARGDLGAQIPLEQVPSAQQRIVQVCRQLNKPVIVASQLLESMIEYPTPTRAEVADVSEAVRQRADALMLSGESAMGQYPDKALTVLRSVSLRIERWWREEKRYEAMLLPSVGSYFSEKISEEICNSAAKMANNLEVDALFVYTKTGHMASLLSRCRPDCPIFAFTTTSSVRRRLNLQWGLIPFRLSFTDDMESNLNRTFSLLKARNLIKSGDLVIAVSDMLQSIQVMNVP

SEQ ID NO: 72410 - protein, 119 aa, Glycine max
  Clone ID: 701069857_FLI.pep
LGRGSAVVLLLCFLLLHSQMARAATYTVGDSGGWTFNTVAWPKGKLFRAGDTLAFNYSPGTHNVVAVNKAGYDSCKTPRGAKVYKSGTDQIRLAKGQNYFICNYVGHCESGMKIAINAA

SEQ ID NO: 72411 - protein, 209 aa, Glycine max
  Clone ID: 701106195_FLI.pep
TMILIISLIFSLLSFSHASVLDFCVADYAGPIGPAGYSCKKPSKVTADDFAYSGLGIAGNTSNIIKAAVTPAFDAQFAGLNGLGISAARLDLAAGGVIPLHTHPGASELLVVIEGSILAGFISSANIVYLKTLKKGDVMAFPQGLLHFQINAGKSSALAIVSFSSSNPGLQILDFALFKSSFPTPLIVQTTFLDAALVKKLKGVLGGSG

SEQ ID NO: 72412 - protein, 410 aa, Glycine max
  Clone ID: 701106228_FLI.pep
VMAACLQLWQCKLARPFDSLPVRRSIPLSLRCSAAPSSSKPTRSYSITLIPGDGIGPEIISVAKDVLVLAGYLEGIKYDFREMLMGGAALDATGLPLPHETLSAAKQSHAVLLGAVGGYKWDRNDKHLKPETGLLQIRKELGVFANLRPATVYSPLVDASTLKREVAEGVDIMLIRELTGGIYFGEPRGFGTNDNGEEIGFNTEIYATHEIDRIAHFAFKVAQKRRRKLCSVDKANVLEASMLWRKRFLAIAQEYPDVELSHMYVDNASMQLIRDPKQFDTMVTNNIFGDILSDEASMVTGSIGMLPSASLGASGPGLFEPIHGSAPDIAGQDKANPFATVLSAAMLLRYGLGEEKAAERIENAVMDTLNRGFRTGDIYSAGTKLVGCKQLGEEILKSVESNVPAGAAAV

SEQ ID NO: 72413 - protein, 859 aa, Glycine max; identical to SEQ ID NO: 45902
  Clone ID: 701106423_FLI.pep

SEQ ID NO: 72414 - protein, 746 aa, Glycine max
  Clone ID: 701108476_FLI.pep
EKSEQIQRMNGVTHLEPDESEFVEVDPTGRYGRYNEILGKGASKTVYRAFDEYQGIEVAWNQVKLYDFLQSPEDLERLYCEIHLLKTLKHRNIMKFYTSWVDTANRNINFVTEMFTSGTLRQYRLKHKRVNIRAVKHWCRQILSGLLYLHSHDPPVIHRDLKCDNIFVNGNQGEVKIGDLGLAAILRKSHAAHCVGTPEFMAPEVYEEAYNELVDIYSFGMCILEMVTFEYPYSECTHPAQIYKKVISGKKPDALYRVKDPEVRQFVEKCLVTVSLRLSARELLNDPFLQIDDYEYDLKTVENGELDEFGSLMRQPFFDLHRSYSNFSNEYSNGFGYEGDWGPHPAEIEPSGIELFEYHDDDEPSEDVDISIKGKRKDDGGIFLRLRIADKEGRIRNIYFPFDIELDTAISVATEMVAELDMTDQDVTRIADMIDGEIASLVPEWRPGPGIDETPRYANEGFCHNCVSNHTSSGSFLDFLSNNPGNKNLQLLECCRHGCASMHGRFGEITFQSEEYDNHARGDLNVSSQLDSLQYQELWNQHESRELSPVESDQSHSDEQCEQLDKPIPAKDKAQDVWEKKFSPNAANSLRNLSGSHDFSTIRSTYCDLEDDYEKEIQKELRWLRAKYQMELRDHKDGQFGQCSHSSNSEHRTENGFLSPSLTETLKGGNNGTRLKPITTKWNCDSSSHPHVHESSPNSDTQRAQNCEAIESPGEGMVTAKSFYTGSLLPHSLHRTVSLPVDAVDI

SEQ ID NO: 72415 - protein, 475 aa, Glycine max
  Clone ID: 701108526_FLI.pep
WLPFYSTTIRLRYSPPPSSSHIIKRRRFHDSIIHRKQNNNKKQQQQREFTWDWEQPREAEEESSSKKVLEQEHTTTPTTPMPMELEQELGSTTIQRSFDARYTRHARDSLGELPDSFTITDPSIPGHPIVFASPGFLKLTGYSLREVLGRPAAIFQGPRTSRKSVIEIREAVREERNAQVVLLNYRRDGTPFWMLFRVSPVFSSDGGAVVHFVAVQVPLQKKEGSGVRDFGFGCCRKEVCVDSLAEIDRVCSLEQVLEPDVRALWDAEVEREEPCEASDDEKRSAVTAMDSIFSVLTHYSEATGRLVCRKRSSIPDVGLLSTSLIISLGRIKQSFVLTNPHLPDMPIVYASDAFLKLTGYAKNEVLGHNCRFLGGTDTDTSTLHLIRESIKTEQPCTVRILNYRKDKSSFWNFLHISPVRDASGKVAYFVGVQIEDNNKNDDSHCLSPEKRQLSVVGVVKVAVRSLSMTAGSSES

SEQ ID NO: 72416 - protein, 277 aa, Glycine max
  Clone ID: 701118532_FLI.pep
FSVNASGQFCGVAEMVGTVDFSKNMDFWQQDKWSGSFPVKWHIIKDVPNPNFRHIILENNENKPVTNSRDAQEIMYLKGLEMLKIFKNHTLKTSLLDDFMYYENRQKIMQDEKAKFLVKSFDSPIFVPVLEAPQKLNFFVDVPTDNYEKNLKPKDDSDGLKHISFSSPEQIVGNSDVTGIKHAHDEKDEKIAVDKEHISSILKIGSVTIAPKQVEAKQSVSNGNKEPVDVLTVGSMQVKVNGFPSSSGFLKVGSTPFDARALQPGKGDAAVKSGSQR

SEQ ID NO: 72417 - protein, 107 aa, Glycine max
  Clone ID: 701118560_FLI.pep
SGMFISQEQGSNCVWDSIWVETKEKKCIPDTMSLHAGCPVIEGEKWSATKWIHVDSFDKMVADGGDCNDKQENCDRWATLGECTSNPNYMVGSPGLPGYCMKSCKAC

SEQ ID NO: 72418 - protein, 366 aa, Glycine max; identical to SEQ ID NO: 37097
  Clone ID: 701121160_FLI.pep

SEQ ID NO: 72419 - protein, 575 aa, Glycine max
  Clone ID: 701124227_FLI.pep
GNGHELCIWSLLSLRSGTLVSADSSGSVQFWDSQHGTLLQAHSLHKGHVHALAACPSHNRVFSAGSDGQVILYKLSSSQSTSSNDINSPSTMKRWIYVHYVRAHTHDIRALAVAVPISHEADIKPEKRIKRARRAENPISFRYHKWAHLGVPMLISAGDDTKLFAYPVKEFTMFSPHDICPAPQRTPIQLVHNSVFNQRKLLLVQSSQKIEVQLLQLKNVRTSGGFTKNVVVAQVNSKASQKIICSTISNSGALFAYSDHKKPSLFQLKRDEVGKIKWDVRKRELPQILPFAHSMIFTHDSSKLIVAGHDKRIYVVNVGGPDEVKSELLHTFTPLRKSQDQELPPTEPPITRLFTSSDGQWLAAVNCFGDIYVFNLEILSQHWFISRLDGASVTAGGFPPQNDNVLIVTTSSNQVYAFDVEAKQLGEWSKRHTYALPRRYLEFPGEVIGLSFPPSETSSSPSATSSSVVVYSSRAMCLIDFGLPVEQDESDMLNTKDSRAMNSQNFNVKKRIEVKKMIEVKKEHNRRNFEVIPFENPVLCLGHTSKNSIFMVDKPWLQVVKSLEGRPVHRHIYGT

SEQ ID NO: 72420 - protein, 156 aa, Glycine max
  Clone ID: 701126938_FLI.pep
EGKGFTEEQEALVVKSWNEMKKNSQELGLKFFKKILEIAPAAQQLFSFLKDSTVPLEENPKLKPHAMAVFVMTCESAVQLRKAGKVTVRESNLKRLGATHFKAGVAAEHFEVTKLALLETIKEAVPEMWSPAMKNAWEEAHDQLAEAIKSEMKPSD

SEQ ID NO: 72421 - protein, 370 aa, Glycine max
  Clone ID: 701128925_FLI.pep
SAAMADGLHSQHPSVVQKLSGQSYLVSRLAPNHSRNCSTTGSYFNGGLQSSGLVPVTAHAPAEKGVSGFLLDFLMGGVSAAVSKTAAAPIERVKLLIQNQDEMIKSGRLSEPYKGIGDCFTRTMKDEGVIALWRGNTANVIRYFPTQALNFAFKDYFKRLFNFKKDKDGYWKWFAGNLASGGAAGASSLLFVYSLDYARTRLANDAKAAKKGGERQFNGLIDVYRKTIKSDGIAGLYRGFNISCVGIIVYRGLYFGMYDSLKPVVLVGGLQDSFFASFLLGWGITIGAGLASYPIDTVRRRMMMTSGEAVKYKSSLEAFKIIVAKEGTKSLFKGAGANILRAVAGAGVLAGYDKLQLVLFGKKYGSGGGG

SEQ ID NO: 72422 - protein, 748 aa, Glycine max
  Clone ID: 701128931_FLI.pep
PKMGKSSKKSAIKVDAAPAVVPPSKSAKKGGKRQAQDEIEKQVSAKKQKIEEVAQKQKKEAKVQKKKESSSDDSSESEEEKPAPKPVLSKKVPAKNGAALPKKDKPVSSSSEDDSSDEDEVNAKKPHKVVAEKQKNGATVQKNKKESSSDDSSSDSEDEKPVAKAAVPSKKTPAKSSNISTPAKKGKPASSSSSSDSSEDDSSDEDELATKKQMNEVKVQKGKEESSSDDSSSDSEDEKPAAKVAVPSKNQSAKNGTLSTLAKKGKPAASSSSSESSDDNSDEDEAPKTKVAPAAGKNGHASTKKTQPSESSDSDSSDSDSSSDEGKSKKKPTTAKLPTLPVAPAKKVESSDDESSESSDEDNDAKPAVTAVSKPSARAQKKVESSDSDDSSSDEDKMDIDDDDDSSDESEEPQKKKAVKNSKESSDSSEEDSEDESEEKPSKTPQKRGRDVEMVDAALSEKKAPKTPVTPREESGTSKTLFVGNLPFSVERADVEGFFKDAGEVVDVRFATDDTGKFKGFGHVEFATAEAAQNALGLNGQQLFNRELRLDLARERGAYTPNSSNWNNSSQKSERGQSQTIFVRGFDTSLGEDEIRGSLQEHFGSCGDITRVSIPKDYESGAVKGFAYVDFGDADSMGKALELHETELGGYTLTVDEAKPRDNQGSGGRGAGGRSGGGGRFGARGGGGGRFGARGGGGRFGGSGGGGRFGGSGGGRFGGRGGGGRGRGNRPNLAAEGTGKKTKFADDE

SEQ ID NO: 72423 - protein, 264 aa, Glycine max; identical to SEQ ID NO: 44831
  Clone ID: 701134693_FLI.pep

SEQ ID NO: 72424 - protein, 288 aa, Glycine max
  Clone ID: 701135234_FLI.pep
DYKREELFLIGSTKFKMTPVNLAGQFGDTTYTKVFVGGLAWETQKETMKKYFEQFGEILEAVVITDKATGRSKGYGFVTFREPEAAMRACVDPAPVIDGRRANCNLASLGVQRSKPSTPKHGGAGRNFRVMGSFQTGFGGGVGSAFPSAATFPHYAIQQGIPYNVYGYSPYSPDYTYPTSYYGVYGGATAQYPVYGSGPAAAAGGMMSGGAAFYPYLQYGGEGSGGGGTSGQGYGVNYPPQAHLFQYSPIASTAGYAQHYGTPTMSLAPSPALQSGVTMPLQAPIPHR

SEQ ID NO: 72425 - protein, 481 aa, Glycine max
  Clone ID: 701124057_FLI.pep
ACLLTLSLLIFLPHIKASQANKLDELILSRSSHNPPVTLSWAEEDALKMHSAAYVAPQEGLRQADKIVTLPGQPHGVNFDQYSGHVTVDPKTGRSLFYYFVESPHNSSAKPLVLWLNGGPGCSSLGYGAFEELGPFRVNSDGKTLFHNKYAWNEVANVLFLESPAGVGFSYSNTTSDYDRSGDKSTAKDAYVFLINWLERFPEYKTREFYITGESYAGHYVPQLAYTILVNNKFSQQSINLKGIAIGNALIDDVTTIKGIFDYFWTHALNSDQTHHLIKKYCDFTSENISAACINATISSILEKGSIDSSNIYAPLCYDSSLKNGSTGSVYDFDPCSAYYVEAYLNRPEVQKALHAKPTNWTHCSGFDWKDSPTTILPIIEYLIASHIKLWIYSGDTDATVPVTSSRYSINTLRLPIQVDWHPWYSGNEVGGYVVGYKAVTFVTVRGAGHFVPSWQPARSLTMISSFLSGTLPPASPYDGF

SEQ ID NO: 72426 - protein, 415 aa, Zea mays
  Clone ID: 700381963_FLI.pep
TPVSLIKCLRSIKKHAFVASPYPVIITLEDHLPSQLQEKVAKMVVEVFGNILYYPPDDTHELKELPSPEQLKGRVLLSTKPPKEYLETKLSDSTKEGDADLHLGKGTGDDAVWGKEVPDFRTEIQSAEKDDENDDVDDEEEQKLQPHIAPQYKHLITIRAGKPKDSLADALKSDPEKVRRLSLSEQQLAKAAKDHATEIVRFTQRNILRIYPKGTRVTSSNYNPFVGWVHGAQMVAFNMQGYGRALWLMHGFYKANGGCGYVKKPDFLMQTEPQVFDPREPQPVKKTLKVKVYMGDGWRMDFKQTHFDQYSPPDFYTRVGIAGVPADSVMKKTNAIEDNWTPVWEKEFSFPLTVPELALLRVEVHEYDMSEKDDFGGQTVLPVSELRPGIRAVALFDRKGMKYNHVKLLMRFEFA

SEQ ID NO: 72427 - protein, 653 aa, Zea mays; identical to SEQ ID NO: 56213
  Clone ID: 700466311_FLI.pep

SEQ ID NO: 72428 - protein, 87 aa, Glycine max
  Clone ID: 701070119_FLI.pep
ASVTQNPSGACFLRSSFASAIRMESQVKHALVVKVMGRTGSRGQVTQVRVKFLDDQNRHIMRNVKGPVREGDILTLLESEREARRLR

SEQ ID NO: 72429 - protein, 616 aa, Glycine max
  Clone ID: 700831968_FLI.pep
LEEIDLSHNELSGSIPPGSSRLLETLTHLDLSDNHLQGNIPAETGLLSKLTHLNLSWNDLHSQMPPEFGLLQNLAVLDLRNSALHGSIPADICDSGNLAVLQLDGNSFEGNIPSEIGNCSSLYLLSLSHNNLTGSIPKSMSKLNKLKILKLEFNELSGEIPMELGMLQSLLAVNISYNRLTGRLPTSSIFQNLDKSSLEGNLGLCSPLLKGPCKMNVPKPLVLDPNAYNNQISPQRQTNESSESGPVHRHRFLSVSAIVAISASFVIVLGVIAVSLLNVSVRRRLTFLDNALESMCSSSSRSGSPATGKLILFDSQSSPDWISNPESLLNKASEIGEGVFGTLYKVPLGSQGRMVAIKKLISTNIIQYPEDFDREVRILGKARHPNLIALKGYYWTPQLQLLVTEFAPNGSLQAKLHERLPSSPPLSWAIRFKILLGTAKGLAHLHHSFRPPIIHYNIKPSNILLDENYNAKISDFGLARLLTKLDRHVMSNRFQSALGYVAPELACQSLRVNEKCDVYGFGVMILELVTGRRPVEYGEDNVLILNDHVRVLLEQGNVLECVDQSMSEYPEDEVLPVLKLAMVCTSQIPSSRPTMAEVVQILQVIKTPVPQRMEVF

SEQ ID NO: 72430 - protein, 474 aa, Zea mays
  Clone ID: 700571675_FLI.pep
PSPLAAANPAPSPRLVAMGTRNLTRNRAASMATASTTLLLSLAFLAFAWAASPSPDAEAISRFQEYLRIDTAQPAPDYAAAVAFLRKQAAEAGLEARTLELVAGKPLLLLRWPGRRPSLPSILLNSHTDVVPSEPNKWDHPPFSAALDEPSGRIYARGSQDMKCVGMQYLEAIRRLRSAGFVPDRNIYITFVPDEEIGGHGGVEPFVSSKEFKDMNVALVLDEGLASPGEEYRVFYAERSPWWLTIKATGAPGHGAKLYDGSAMENLMKSVEAIRRFRTSQFDLVKSGEKAEGDVVSVNFAYLKAGTPTPTGFVMNLQPSEAEVGLDIRIPPSAHVEALERRLVEEWAPPSRNLTFEFKQKMSVLDNFGKPAMTAADSTNPWWTLLEEAVKSADGKLGKPEIFPASTDARYFRKIGLPAFGFSPMANTPILLHDHNEFLSKDEYLKGIGIYESIIRALATHEDGGKDDESRAEL

SEQ ID NO: 72431 - protein, 60 aa, Glycine max
  Clone ID: 700833222_FLI.pep
KDLQKNGMKPATNTAQRRSAAQIQGISSKPKPKKKKSEISKRTKLTNAHLPELFQTLNSS

SEQ ID NO: 72432 - protein, 194 aa, Zea mays
  Clone ID: UC-ZMFLB73224F03_FLI.pep
NLIPGEEITYISISQPSHFFSVPDDTRGISPHISAWILLAAELLLQHQCLKPSYLQFPVVDLALLLIPSPAVLVFLTGVPSRLARLQSPSRSGNFPFLWCRARCWSLRVHLAPASDTGAGSLMLARVCPRRQQLGLYVSPSASRHRNSIMSVCVWKNEIEGSEKKAKPMWFVRSFGLELELWILEKKFREISGR

SEQ ID NO: 72433 - protein, 284 aa, Zea mays
  Clone ID: UC-ZMFLB73296F08_FLI.pep
AVCRSCATATSRTGSRSRATSGTGPRRSLATLTSRLRNHGSGLSRSTPFSRRTPSGLSVGRWAATLALRDLTTAPSERTSPTGGTSWTRTTRPASTPASTSVASTGRSCRGSGSSRSVLPSGVSAGDQLWVARYILERITEIAGVVVSFDPKPIPGDWNGAGAHTNYSTKSMRSDGGYEVIKKAIGKLGLRHREHIAAYGDGNERRLTGRHETADINTFVWGVANRGASVRVGRDTEKEGKGYFEDRRPASNMDPYVVTSLIAETTMLWEPSHSNGDGKGAAAP

SEQ ID NO: 72434 - protein, 264 aa, Zea mays
  Clone ID: UC-ZMFLB73371H12_FLI.pep
RSNDGEVAVLREGAHEQGRVDQGGGRPSGGVHQGARRGVLALPSQGRRTCALRQELPPPVDQLPAARPQARQLHGGGGRAHHQAPQPTRQQMVPDRWKAAGQDRQRDQELLEHAHPAEAAEQGDRPGDTPPHQRAHVQHNHIVRGLGPGEGAQVPRPEPGPLHQPAVPGGGGGHAAEAGEAGGGRALLQLQPGAPQERGLQVQQLPRAQDRHARLQKTRDEMRASIHLCLSLSVTSPLITRSSSSHQLICRSINSVSLSLSLAM

SEQ ID NO: 72435 - protein, 93 aa, Zea mays
  Clone ID: UC-ZMFLMO17030G11_FLI.pep
ASLKQLYLFNLQEQMFCEANKCLRRRLEESNQVIWQHAWEQSERHSEVQPQQLNGNNFFHPLDGAGEPTLQIGYPSEALTSSCMTTFLPPWLP

SEQ ID NO: 72436 - protein, 265 aa, Glycine max
  Clone ID: 701134785_FLI.pep
SLCDLFRVVASSSKMLARLAASRFNEIRQIFRQPSRAFSTALNYHLDTPDNNPKLPWEFTEANQAKVKEILSHYPSNYKQSATIPLLDLAQQQHGGWLPVSAMDAVAKIVEVPPIRVYEVATFYSMFNRAKVGKYHLLVCGTTPCMIRGSRGIEEALLKHLGVKRNEVTPDGLFSVGEMECMGCCVNAPMITVADYSNGSEGYTYNYFEDVTPEKVVEIVEKLRKGEKPPHGTQNPRRIKSGPEGGNTTLLSEPKPPPCRDLDSC

SEQ ID NO: 72437 - protein, 347 aa, Zea mays
  Clone ID: UC-ZMFLMO17211A05_FLI.pep
VDHWPPSAVAVSGFYWKLTSWRITDGLSNCTGLLIIFLGNNHLTGEIPSWLGGFPKLAALDLSKNNLTGSIPPSLGNLTNLQELYLQINQLEGSIPKELGRLKNVQWFALFANHLSGEVPKAVFNLSSVVGFGVDQNDLHGTLPSNWGNNQPDLEFIYLAKNHFTGNVPASLANATMMDTIDLGVNNFTGRMPPEIGTLCPIIFSFDSNQIEASATEGWEFVTLLTNCTRLRVLSFRNNMLAGELPPSVGNLSSTHLQVLYTGWNEIYGRIPPGISNLVNLQKLSLSQNHFTGALPNTIGRLKMMRDLGIDGNLLSGTIPPSIGNLTLLELITMDNNNLEGSLPSRG

SEQ ID NO: 72438 - protein, 276 aa, Zea mays
  Clone ID: UC-ZMFLB73130E03_FLI.pep
PYFCLGDLWEAFNEWSFYGAGVPLVISGSESVIQYYVPYLSAIQLYADPLKLPSRIRHPWEESDGESMDTSSEGSSETDDIRLRSLTVEATHRLDGGFQRDGDEMHSPSTRPIFEYLETDPPFGREPLTDKVSVLASRFPDLKKFRSCDLLPTSWMSVAWYPIYRIPTGPTLKDLDACFLTFHYLSTPSKDTDPSTPPCPNLGGLNCNMNAAGKLTLPVFGLASYKLKSSIWSSNRPEEQQLAASLTQTADDWLRHRQVYHPDFRFFLTHFNTALR

SEQ ID NO: 72439 - protein, 291 aa, Zea mays
  Clone ID: 700102230_FLI.pep
NKATQASGLPELTSEVTNAPSTDIRPSPDARSRRGQLNHEARMARYDRAITVFSPDGHLFQVEYALEAVRKGNAAVGVRGVDTVVLGVEKKSTPKLQDSRSVRKIASLDTHIALACAGLKADARVLINRARVECQSHRLTVEDPVTVEYITRYIAGLQQKYTQSGGVRPFGLSTLIVGFDPYTQKPALYQTDPSGTFSAWKANATGRNSNSMREFLEKNYKETSGKETIKLAIRALLEVVESGGKNIEIAVMTHEDGLHELEEAEIDEYVAEIEAEKAAAEAAKKGAPKGN

SEQ ID NO: 72440 - protein, 318 aa, Zea mays
  Clone ID: UC-ZMROB73055G06_FLI.pep
TNNFSEKLGEGGFGPVFKGILPDGQEIAIKRLSKTSAQGLEEFKNEVTVLSKLQHRNLVRLFGCCVHGEEKMMVYEYMPNKSLDSFIFNESKRLVLGWSLRYKIIQGIGRGLLYLHQDSRLKIIHRDLKASNVLLDDDFSPKISDFGMARIFGEHQLQDLTRRIVGTYGYISPEYAMEGKFSDKSDVFSFGVLVLEIVSGRRNSSLLDDEWSMNLLGYAWTLWKEGSVSELIDPLMGATYAYDEACRCVQVGLLCVQEVPAERPAMPLVLRMLSGDAAIPSPKQAAFFVGRAPRLPPADDSSNTESGNQLTCTDLQGR

SEQ ID NO: 72441 - protein, 290 aa, Zea mays
  Clone ID: UC-ZMFLMO17266C11_FLI.pep
SFFFPPASMHVCLTTFLYGVTRTLTQGPSGRVHGGGAADGVRGAGADGGGAGHRRRRRGRGAGAAGGARGQRLHAAGEPLPAAAGAQPQPHGVRRAHRPADHLGAPRQRHLRPGDRAAGRRLGLRPARRGRLLRQRRRHPAGVDEREVQEREAQGGGEQREVPGVHGLLRRPAARREAGPAAAAPGRRRPEPVPGLHLERVQDQRVQDQARGRPPVPLREEVARGYVICMTGGRIDYHVCFSVYVSCIATALATGARTCILVAMLVLYVHVYARIYMVAPHRVSCIHCYL

SEQ ID NO: 72442 - protein, 56 aa, Glycine max
  Clone ID: 701065029_FLI.pep
HKQDGFIELMPGQMDIDVKVITGKLNRKICYFINRIVENASNGMNNRHSPNTSLHK

SEQ ID NO: 72443 - protein, 188 aa, Zea mays
  Clone ID: LIB3587-213-D5_FLI.pep
RTGGWCWRCGPPSSGTRARPWSSCSSRSASRTAAACCPCTSATTAPTRTPSRSCGAAARTRASASSCPSTPRRRAPPTRSKGPPRWVRDPHPPTKASVSIPCLRPRLPLSAAPHSVPWTTTSTAPLPVAGGGVAADLTSVSVVLCNYRQFAYSAAALLTLPCGCAQVMEFLLRLVEWKRLSRARLRLQ

SEQ ID NO: 72444 - protein, 623 aa, Glycine max
  Clone ID: 700894016_FLI.pep
EDPYQVLSNWDTVESDPCNWFGVLCTMVRDHVIKLNISGSSLKGFLAPELGQITYLQALILHGNNFIGTIPRELGVLESLKVLDLGMNQLTGPIPPEIGNLTQAVKINLQSNGLTGRLPPELGNLRYLQELRLDRNRLQGPIPAGGSSNFASNMHGMYASKENVTGFCRSSQLKVADFSFNFLVGRIPKCLEYLPRLSFQGNCLQGQELKQRSSIQCAGASPASAKSQPVVNPNHQPAEYVSKHHRASKPVWLLALEIVTGTMVGSLFLVAVLAAFQRCNKKSSIIIPWKKSGSQKDHTAVYIDPEFLKDVRRYSRQELEVACEDFSNIIGSSPDSVVYKGTMKGGPEIAVISLCIKEEHWTGYLELYFQREVADLARLNHENIGKLLGYCREDTPFTRMLVFDYASNGTLHDHLHCYEEGCQFSWTRRMKIAIGIARGLKYLHTEVEPPFTISELNSSAVYLTEEFSPKLVDFESWKTILERSEKNSGSIGSQGAICVLPNSLEARHLDTKGNIFAFGVLLLEIISGRPPYCKDKGYLVDWAKDYLEMPDEMLCVVDPEMKFFRYEDLKVICEVITLCVNPDTTVRPSMRELCSMLESRIDTSVSVELKSSSLAWAELALLS

SEQ ID NO: 72445 - protein, 496 aa, Glycine max
  Clone ID: 700836945_FLI.pep
SSGGSVELGAVAAIRMPLLHVSNFKGGTPELVETCYAILVLVLPSSSTRVWTYHEMEIVEVVADQVAVALSHASVLEESQLMRQKLEERNRALQQAKKNAMMASQARKSFQKVMSHGMRRPMHSVLGMLSLFQEDNLRSEQKIIGDTMLKVGHVLSSLINDVMEISENEKGGFRLEMKPFLLHSMVREAASIAKCLCVYEGFGFEIDVQKSLPETVMGDEARTFQVILHMIGYLLNMNDKGTLNFRVFLESDGGDRDDKNIGIWRSSNQNEYVHIKFDFQITESSQSDEAISTIHYTGRRQYYNNEPKGGLSFSMCKKLVQMMQGNIWISPNSLGLVHGMTLLLKFQIGPSLEKSIFAPKDYSSSQFRGLKVVLAEDDGVNRTVTKKLLEKLGCQVIAVSSGFECLSAVSGAGNSFRIILLDLHMPEMDGFELAKRIRKFHSRSWPLIIALITSAEEHVREKCLLAGMNGLIQKPIVLHQIADELRTVLQRAGEKL

SEQ ID NO: 72446 - protein, 388 aa, Glycine max
  Clone ID: 701101269_FLI.pep
GVLFFHAETRDHLIKPAFIRVWVIYCKLFLIIFDCVYTCVLKVANPKEKGNEVDDNKELILFHEGIMNNPTLSRLFPGLNREREMSAMVSALTHVVSGEVPITGDSSSSSSLVLHHQPHDDTVIVTPTMPSSSSSSTYVVGTSSLKRSRENDTYTSSLFSHPPSSSPAMPTRAEYATREMGNSVYEYRTTTENATRDEGRRKYRGVRQRPWGKWAAEIRDPFKAARVWLGTFDTAEAAARAYDEAALRFRGNKAKLNFPENVTLRQPQFTVSNSPSSLVSITTSTDPVVHSTRPLLLPSQASTATNVYEYFQLSGFPTNTNLYDGNRMFVTSNAMASHHLQSSSSLLSSSSSAFVSSVTSQDTSLSSLYSGQLPPWSKVSGHSSSSSG

SEQ ID NO: 72447 - protein, 395 aa, Glycine max
  Clone ID: 701065031_FLI.pep
EMAQETFLFTSESVNEGHPDKLCDQISDAVLDACLEQDPDSKVACETCTKTNMVMVFGEITTKANVDYEKIVRDTCREIGFISDDVGLDADKCKVLVNIEQQSPDIAQGVHGHFTKRPEEVGAGDQGHMFGYATDETPEYMPLSHVLATKLGARLTEVRKNGTCAWLRPDGKTQVTVEYYNDNGAMVPVRVHTVLISTQHDETVSNDQIAADLKEHVIKPVIPEKYLDEKTIFHLNPSGRFVIGGPHGDAGLTGRKIIIDTYGGWGAHGGGAFSGKDPTKVDRSGAYIVRQAAKSVVANGLARRCIVQVSYAIGVPEPLSVFVDTYGTGKIPDKEILQIVKENFDFRPGMITINLDLKRGGHRFLKTAAYGHFGRDDADFTWEVVKPLKSEKPQA

SEQ ID NO: 72448 - protein, 387 aa, Glycine max
  Clone ID: 701065034_FLI.pep
ASGDRIQLQPTTYSFGLVCLIEDQGRKMLGVIRHKSIRPAFSAIRHFSSAAKEITVRDALNSALDEEMSADPKVFLMGEEVGEYQGAYKISKGLLDKYGPERVLDTPITEAGFAGIGVGAAYYGLRPVVEFMTFNFSMQAIDHIINSAAKSNYMSAGQISVPIVFRGPNGAAAGVGAQHSQCYASLYGSCPGLKVLSPYSSEDARGLLKAAIRDPDPVVFLENELLYGESFPVSAEVLDSSFCLPIGKAKIEREGKDVTITAYSKMVGYALKAAETLAKEGISAEVINLRSIRPLDRSTINASVRKTNRLVTVEEGFPQHGVGAEICTSVIEESFGYLDAPVERIAGADVPMPYAANLERMAVPQVEDIVRAAKRACYRSVPLAASA

SEQ ID NO: 72449 - protein, 374 aa, Glycine max
  Clone ID: 701065489_FLI.pep
TSFTCLMALHISSGCFTVMCNSRVHRIRAVASEGSATLNTVVEEKVKLGGSDLKVSRVGIGAWSWGDTTYWNNFEWNDRNEKAARAAFNASIDGGLTFFDTAEVYGSGLALGAVNSEVLLGRYIKERKEKDPDVEIEVATKFAALPWRFGRQSVLNALKDSLCRLGLTSVDLYQLHWPGVWGNEGYIDGLGDAVEKGLVKAVGVSNYSEKRLREAYEKLKKRGIPLATNQVNYSLIYRVPEENGVKAACDELGITIIAYSPIAQGALTGKYTPDKPPSGPRGRIYTPEFLTRLQPLLNKISEIGEKYDKTPTQVSLNWLVAQGNVVPIPGAKTAEQAEEFIGALGWRLTDEEVAELRSLASEIKPVIGFPVEKL

SEQ ID NO: 72450 - protein, 616 aa, Glycine max
  Clone ID: 701121308_FLI.pep
EPLLSFPRAGVSPVQWIQLLNALDQQGLPLLSPVKVHLQKCNKCSREFCSPINYRRHIRIQHRLKKLDKDSDKNRDLLGAYWDKLSVEEAKEVVSFKNVMLEEVPGSSILEALTTLRKQGFSSLPQYYLRAGSALLNIVQSRPSSFPKSSQELFSILDDSSEKTFLVGSAVSMQRYVFDGEAGKIGLEPKNLVACTSFLLEQNLVKAWLADKDAEALRCQKLLVEEEEAAQKRKYEILERKHQKKLRQKEHKARERLEDDTEIKENIRSTGEDVSPTEASSGTCDFEAHNPDIFADHSTPPHVTSRCLDNDEVIEGVTLSGYDFDTDQYIERQTSRGHNHRRIMATRWQGLPKSQWAIANGSHPGHNSQMSKLGVIQKHGTNCDQRVAPIVNGSKFWSRKPKPETNGVVLKARLQKEPDKCKNHEVLIGSVSVCLGNCSHSEGNLVAPQRDSLVDNLAKQNTAQEKPVKHDSSQGSNGRLTVKLWRPVSQHGTKDLLPLQNGGTEADVINGKYDLNLSGQCSLRLCSIDGSDIGFGDNFSHTGDSESLRLSSHAAKAFLVQRWKEAISSNHVKLFVTPDCQSSNADRCSIIANSENRLPATSGVAKSKPKTKLEKE

SEQ ID NO: 72451 - protein, 858 aa, Glycine max
  Clone ID: 701129319_FLI.pep
LKQHLARVSGEVTYCEKAPDEVYLKMKENLEGCRSHKKQKQVDTQAYMNFHSNDDEDEEEQVGCRSKGKQLMDDRNVSVNLTPLRSLGYVDPGWEHGVAQDERKKKVKCNYCEKIVSGGINRFKQHLARIPGEVAPCKSAPEDVYLKIKENMKWHRTGRRLRRPEIKELMPFYAKSDNDDDECELVEDLHHMNKETLMDVDKRFSKDIMKTYKGVSHSTGPEPVLRRSRLDNVYLKLPKNQTPQAYKQVKVKTGPTKKLRKEVISSICKFFYHAGIPIQAADSLYFHKMLEVVGQYGQGLVCPASQLMSGRFLQEEINSIKNYLVEYKASWAITGCSIMADSWIDTQGRTIINFLVSCPHGVYFVSSVDATNVVEDAPNLFKLLDKIVEEVGEENVVQVITENTPNYKAAGKMLEEKRRNLFWTPSATYCINCMLEDFMKIRCVEECMEKGQKITKLIYNQIWLLNLMKSEFTRGQELLKPAATQFASSFATLLSLLDHRVALRRMFLSNKWISSRFSSSNEGKEVEKIVLNVTFWKKIQHVRKSIDPIMQVLQKLYSGESLSMPYLYNDMYRAKLAIKSVHGDDARKYEPFWKVIDSHWNSLFCHPLYLAAYFLNPSYRYRQDFVAHSEVVRGLNECIVRLEPDNMRRISASMQIAHYNAAQDDFGTELAISTRTGLEPAAWWQQHGISCLELQRISVRILSQTCSSFACEHDWSIYDQIRCKRQNRLSQKKLNDIIYVHYNLRLRECQLRKRSRDSKLSSVDSVLQEHLLDDWIVDTNVQNFDVDKNFLFGVELDDEYENDSIDYEDGAARHLKGSLELVTMADVAVGSPDVDHANIDADTDDESDLNYFDDDLSE

SEQ ID NO: 72452 - protein, 356 aa, Glycine max
  Clone ID: 701129482_FLI.pep
LFRRMEKKKVAVPLVCHGHSRPVVDLFYSPVTPDGFFLISASKDSSPMLRNGETGDWIGTFEGHKGAVWSCCLDTSALRAATASADFSTKVWDALTGDELHSFEHKHIVRACAFSEDTHLLLTGGVEKILRIYDMNRPDAPPREVDKSPGSVRTVAWLHSDQTILSSCTDMGGVRLWDVRSGKIVQTLETKSSVTSAEVSQDGRYITTADGSTVKFWDANYYGLVKSYDMPCTVESVSLEPKYGNKFVAGGEDMWVRVFDFHTGNEIACNKGHHGPVHCVRFSPGGESYASGSEDGTIRIWQTGPLTLDDSETVSANGSVDKVKETADEVSRKIEGFQIADEGKSKEKDEAVEESS

SEQ ID NO: 72453 - protein, 592 aa, Glycine max
  Clone ID: 701134487_FLI.pep
LLIKKMESVKFINMNAKHSSIFLLAMIFVLILASANAKIHEHEFVVEATPVKRLCKTHNSITVNGQYPGPTLEINNGDTLVVKVTNKARYNVTIHWHGVRQMRTGWADGPEFVTQCPIRPGGSYTYRFTVQGQEGTLWWHAHSSWLRATVYGALIIRPREGEPYPFPKPKHETPILLGEWWDANPIDVVRQATRTGGAPNVSDAYTINGQPGDLYKCSSKDTTIVPIHSGETNLLRVINAALNQPLFFTVANHKLTVVGADASYLKPFTTKVLMLGPGQTTDVLITGDQPPSPYYMAARAYQSAQNAAFDNTTTTAILEYKSPHHSNHSHHHSKGALKKKTKPIMPSLPAYNDTNTVTAFSKSFRSPRKVEVPAEIDQSLFFTVGLGINKCPKNFGPKRCQGPINGTRFTASMNNVSFVLPNNVSILQAHHLGIPGVFTTDFPGKPPVKFDYTGNVSRSLWQPVPGTKAHKLKFGSRVQIVLQDTSIVTPENHPIHLHGYDFYIVAEGFGNFDAKKDTAKFNLVDPPLRNTVAVPVNGWAVIRFVADNPGAWLLHCHLDVHIGWGLATVLLVENGVGKLQSIEPPPLDLPLC

SEQ ID NO: 72454 - protein, 445 aa, Glycine max; identical to SEQ ID NO: 55279
  Clone ID: 701134884_FLI.pep

SEQ ID NO: 72455 - protein, 440 aa, Glycine max
  Clone ID: 701105838_FLI.pep
EMHAGLASEGGSKLKMLITFVHNLPNGTEKGTYYALDLGGTNFRVLRVHLHGQQSSVLEHEVERQPIPQHLMTSTSEDLFDFIASSLKEFIEKEGNASELSLDRRRELGFTFSFPVKQMSVSSGILLKWTKGFSIVDMVGIDVPACMQEALTRKGLDVRVAALANDTVGTLALGHYNDSDTVASVIIGTGTNACYLERVDAIIKCQGLLTASGYMVVNMEWGNFWSSHLPRTSYDIDLDSESPNPNDQGFEKMISGMYLGDIVRRVILRMLLESDMFGPISSKLSIPFMLRTPMMAAMHEDDSPDLREVARILKDILEIPDVPLKLRKVVVKVCDVVTRRAARLAAAGIVGILKKIGRDGSGGITGGRRSEMKMKRTVVAIEGGLYSSYTLFREYLHEALNDILGEDIAKHVTLKVTEDGSGVGAALLAASHSSYDVDTV

SEQ ID NO: 72456 - protein, 589 aa, Glycine max
  Clone ID: 701118915_FLI.pep
MASTRDKDEAEHQRGYWRWSKQDFLPEESFQSWSNYVSALSQTRLRFKDRLLARSDDATETEELKKQSEHDMKRCLNWWDLIWFGFGAVIGAGIFVLTGQEAHDHAGPAIVLSYVASGFSAMLSVFCYTEFAVEVPSAGGSFAYMRVELGDFVAFITAGNILLESVIGSAAVARSWTSYFTSLLNRPKDSLRIKTSLKEGYNLLDPIASVVLVIASVITIISTRKTSVLNWLASAINTAVIIFVIVAGFLHADTSNLTPFLPYGAKGVFQAAAIIYFAYGGFDHIATMAEETKNPSRDIPIGLVGSMSMITVIYCLMALSLSMMQKYTEIDTGAAFSVAFQNVGMRWAKYVVAFGALKGMTTVLLVGRLAQARYITHIARCHMIPPWFALVHSKTGTPINATLLITIASATIAFFTGLKVLSSLISVSTLFVFMMISVALLVRRYYVRGVTPRENLLKLVIFLVLIIASSIGISAYWGLRPNGWFGYSVTVPIWFMATLGMSLFLTQQRVPRVWGVPLVPWLPSLSIATNVFLMGSLEYEAFIRFGVCTVVMLIYYLLFGLHATYDMAHQQEKLPSKVEHTQTVKNEVS

SEQ ID NO: 72457 - protein, 375 aa, Glycine max
  Clone ID: 701127167_FLI.pep
NLPLFLLPPTSPSSSSIMSHFKGKYHDELIVNAAYIGTPGKGILAADESTGTIGKRLASISVENVESNRRALRELLFTAPGALKYLSGVILFEETLYQSTAAGKPFVEVLKEAGVLPGIKVDKGTVELAGTNGETTTQGLDGLGQRCAKYYEAGARFAKWRAVLKIGPNEPSELAIHENAYGLARYAVICQENGLVPIVEPEILVDGSHDIHKCAAVTERVLAACYKALNDHHVLLEGTLLKPNMVTPGSNSAKVSPQVVAEHTVRALQRTVPAAVPAIVFLSGGQSEEEASVNLNAINQVNGKKPWSLSFSFGRALQQSTLKAWSGKEENVKKAQEALLVRAKANSEATLGTYKGNSKLADGASESLHVEDYKY

SEQ ID NO: 72458 - protein, 574 aa, Zea mays
  Clone ID: UC-ZMFLMO17125G07_FLI.pep
PIPNGSINMNSVRNTGDASPRIAGLIGYDRMPNPFTPPNGSILYRVGGHDVPAAMENTSAFGPRSNPTAAQYVQPFIAPESIQHQPGVPLREVYPERAYPEPMPSSYADGKVAVSALPLTDQLFRLDINTMKKLEGQDDGNSTRNVNETTLLHAVDEPSTLPHHVGSVHEVDPKQEKLTEKESRQKQHEAGATALQECEDISEDMLNFLPELIASVKKVTLEDAAETQIAQSDANAAVSPVPDDDDNGKKLDEATAGNTNANQDLDLQGSLDRQKSFKIESTTAEAEALSKGLQTIKNDDLEEIRELGSGTYGAVYHGKWRGCDVAIKRIKASCFAGRPSERERLITDFWKEALILSSLHHPNVVAFYGVVRDGPDGSLATVTEFMVNGSLKQFLRKKDRTIDRRKRVILAMDAAFGMEYLHGKNIVHFDLKCENLLVNMRDPQRPICKIGDLGLSKVKQHTLVSGGVRGTLPWMAPELLSGKNNMVSEKIDVYSFGIVMWELLTGEEPYSDMRAAEIIGAIVNDSLRPQIPSWCDPEWKGLMESCWSSDPAERPSFTDISQRLRKMAAAMNVK

SEQ ID NO: 72459 - protein, 96 aa, Glycine max
  Clone ID: 701100632_FLI.pep
KFGIRSFATRLGKKKVFWICVSLFEVAFGVVLLAGASSSSPLWIKIITGLGSIIPATILWYQTKYVDLSSPDSTRSFYMLNWKLLNVAFLFLPLIR

SEQ ID NO: 72460 - protein, 153 aa, Zea mays; identical to SEQ ID NO: 48136
  Clone ID: 700260476_FLI.pep

SEQ ID NO: 72461 - protein, 74 aa, Zea mays
  Clone ID: LIB3595-007-A12_FLI.pep
PSQVHLLRRRREGAVQLHTVEPDGNRPPPPSLRLRQRGMKQGRVSMQRWRTEIDICSSSVKIVQIFIIKHLSIF

SEQ ID NO: 72462 - protein, 346 aa, Zea mays
  Clone ID: LIB3607-029-C9_FLI.pep
KNTQGTMCGGAILAELIPPTRRVASKPVTEGHLWSASSKKAGSGRDKRHQHEYADDDFEAAFEDFDDDFDVHEDDEDGHFVFSSKSALSPALHDGRAASQKKQRGRQFRGIRQRPWGKWAAEIRDPHKGTRVWLGTFSTAEDAARAYDVEARRLRGSKAKVNFPAASGRARGRARPRRGDDGNPRTAPETQHPAQPALLPRGERETQRKEGIAAVKPEATESFDVGGGLFFDMAFPTFPASPPPQAVDTSFAGSTATSETGSPAKRPRCDEDSSEGGSGSALELADELAFDPFVLLQMPYSGGYDDDSLDGLFAADEAVQQDVGNGMDGVRLWSFDEFPPVDGSVF

SEQ ID NO: 72463 - protein, 504 aa, Zea mays
  Clone ID: UC-ZMFLB73129D04_FLI.pep
LLASTIVPHPNQGNMHEPAIDMPFGSVLLQALVSSDVNGDMEACCRASSVLSHIVKDNMQSKDRVLQIQLETLTPSLGRTEPVLHRIVTCLSIAASTEGENNQNNQPEEPYIQPVILRLLIIWLVDCSNAVNCLLESAVHLNYIIELASSKRYTACVRGLAAVVLGACILYNASHEKGRDAFAVADAISQKIGLTTYFLRFDELRRSLAHPLPEQHHRKELSRSSANSMSDFQEIEEDETNKDDQHPVLSEIFDSQFVNFLSKLEADIRENIMDIFSRTKTATALLPTELEQKNGEVDGEYIKRLKSFVEKQCNEMQDLLARNAMLAEELVRTGGGTTTDTSQRPNNGRERVQIEALRQELEGARRQIEALETDKSQIEAEANNQRNLAVKLESDLKSLSEAYNSIEQANYRLDAEVKTLRQGGSVPYPDVEAIKAQAKEEAEKDSEAELNGLLVCLGQEQTKVEKLSTRLAELGEDVDALLQGIGDDTAIPDDDDDDDEDSEE

SEQ ID NO: 72464 - protein, 983 aa, Zea mays
  Clone ID: 700082072_FLI.pep
FLHCSTVMHSPVLLATRADFDDLHEAHMPCYALVCSRMLVPLDDAPSLDIPPAVVNLLQEYADVYPTDLPPGLPPLRGIEHQIDLIPGASLPNRAPYRTNPDETKEIQRQVQTLLDKGYIRESLSPCSVPVLLVPKKDGSWRMCVDCRAINNITVRYRYPIPRLDDMLDELSGAVIFSKVDLRSGYHQIRMKLGDEWKTAFKTKFGLYEWLVMPFGLTNAPSTFMRLMNEVLRAFIGLFVVVYFDDILIYSKSIEEHLEHLRAVFDALRAARLFGNMEKCTFCTQRVSFLGYVVTPQGIEVDSIKIAAIREWPTPTTVTQIRSFLGLAGFYRRFVRDFSSIAAPLHELTKKDVPFAWSDSQEVAFSTLKDKLTQAPLLQLPDFNKVFELECDASGIGLGAVLLQEGKPVAYFSEKLSGASLKYSTYDKELYALVRTLHTWQHYLWHREFIIHSDHEALKHIRTQTNLNRRHAKWVEFIESFPYIIKHKNGKDNVIADALSRRYTMLSQLDFKIFGLDTVKDQYVDDADFKDAFGHCINGKPWGKFHIQDEFLFRANKLCVPASSVRLLLLQEAHGGGLMGHFGVYKTHEVLAAHFFWPRMRADVERLVARCTTCQKAKSRLNNHGLYMPLPVPSSPWLDISMDFVLGLPRTKKGRDSIFVVVDRFSKMAHFIPCHKTDDASIVAELFFREIIRLHGIPKTIVSDRDAKFLSHFWRSLWNKLGIKLLFSTTCHPQTDGQTEVVNRTLSTMLRAVLDKNLRRWEDCLPHVEFAYNHATHSSTKMCPFQIVYGYIPRAPIDLISLNAANAPHVDASAHVEQMISIHEQTKQNIAATNTKNQVAGSKGRKHVTFEPGDMVWLHLRKDRFPTLRRSKLMPRAAGPFKILTKINDNAYTLDLPAEFGVSTSFNVADLKPYAGEDEELPSRTTSVQEGEDDADINTNTSTSTPAAPSPAQAPPLPPGPVTRARARELNYIMLLKNEGPEE

SEQ ID NO: 72465 - protein, 155 aa, Zea mays
  Clone ID: 700221194_FLI.pep
PHSTSRPEGVLPGFEPLLPSPLQAQRRAEIQSEIELTSSFVASQSGEAMSGVITKFAVTSMVMWMAPVAIMYGFYYQVFPGVSQMSSSAQTLASGFLAVISVNLVIGFYIFMAMKETPHQEPQPDPTFLEKAKASINQPTSSRVSDDSKGKGKVE

SEQ ID NO: 72466 - protein, 262 aa, Zea mays
  Clone ID: 701163433_FLI.pep
RFHINFSMIRCIHGCYITQSRSAQFSRDKNRSSNSNPRGEILSTHPSPQHVTMGGNIRKHFRLVLELHLSAERVVRRAAPDLVGGVLDAAVTEGGVLLVLLDGLEDGLEDGDLAGDAEHALLLEPELLLGLPQQGREGAVLQVLHRDHEPLHRGAHAHGEVALGRRRRGPRGRPVREGERTLQELPGLALAGIASAAAGGGRAWLLGGDRELAPLLQHLLHPHDLGDLVRLLGAGMLHLRFFVLGTIWGIFLVVLRRSQRVC

SEQ ID NO: 72467 - protein, 202 aa, Zea mays
  Clone ID: 700101313_FLI.pep
AARVAAPDAPASFHVEFRQSGARTPQCTMLGALTKPSDESVLKKLSTRWQKKFGEEIDQDLLYLISVDRILHMEDFNEDGMWVVPSDYTSAEPDPLRNFAENIVEEFNNKNAEDVRRIYNIYVESDLQVADVKMIWVDRLGFDLHAHSAEGVLAVRVPFPREVSDEKGVKSSFNMMSHHAWEVEKSYASPEFEKVQFLKKVR

SEQ ID NO: 72468 - protein, 225 aa, Zea mays
  Clone ID: LIB4071-010-D7_FLI.pep
RQVRQRRDGRGRGEQEEGAGACSAGGALHDGAARARDHHPRAQLPRLHQPLPSLHDQLRHAPRSRRRWRLEGTVSQGDFTVEQGTINPPNGWKAYYAATKAIINLNAEFYNIIREGSLPAMSRFWLNADYVKCIHATGEFCTGYNAVMESWGMLFNWGQDGGGQGIAFQIRDVRVRVLGEVAWVNMKANVLFHVTNVYELCNGRWYMVHHHSSLMADPPPHNMFA

SEQ ID NO: 72469 - protein, 436 aa, Zea mays; identical to SEQ ID NO: 59800
  Clone ID: LIB3591-079-H7_FLI.pep

SEQ ID NO: 72470 - protein, 421 aa, Zea mays
  Clone ID: LIB3632-043-D6_FLI.pep
SAIPHHAEAERPTQNPTPPPATASSDSLPTPPHPTVPLTPAQPASPQPSDSGHRRHPAMCGGAILSDIIPPPPPRRVTAGHLWPESKKPRRAASGRRGAPVEQHEQEEDFEADFEEFEVESGESELESEDEPKPFAAPRSALARGGLNTGAAGVDGPAANSVKRKRKNQFRGIRRRPWGKWAAEIRDPRKGVRVWLGTFNSPEEAARAYDAEARRIRGKKAKVNFPDEVPTAVSQKRRAAGPASLKAPKMDVEEEKPIIKLAVNNMTNSNAYHYPAVVGHNIIPEPFMQTQNMPFAPLVNYAALVNLSSDQGSNSFGCSDFSLENDSRTPDITSVPAPVATLAAVGESVFVQNTAGHAVASPATGNTGVDLAELEPYMNFLMDGGSDDSISTLLSCDGSQDVVSNMDLWSFEDMPMSAGFY

SEQ ID NO: 72471 - protein, 304 aa, Zea mays; identical to SEQ ID NO: 62129
  Clone ID: LIB3594-042-H8_FLI.pep

SEQ ID NO: 72472 - protein, 181 aa, Zea mays
  Clone ID: LIB4073-015-F5_FLI.pep
ENGKGGEVVKNSSDPTCPSIDRLPFPSESRRPRESQRTRRGTREPGGAKRARGDELLRFMDGASKEPLRKDYYKVLEVDYDASDDTIKLSYRRLALMWHPDKHKGDNDVTAKFQEINEAYKVLSDPAKRLEYDVSGCYEIDQYTLREYLAKFKGMILTCNGLGIDHPSSKWARHLRELKPH

SEQ ID NO: 72473 - protein, 247 aa, Zea mays
  Clone ID: UC-ZMFLB73188D02_FLI.pep
MCPSSNLSSCRELGNHVTCSFTAQAIHNNNGEKMDSPSNGLSIVGYLRPAFIEEESYLRSMFHGDNGGYSSDWKVNETDEYNRETRPVSGTNRLIDDDKSRFDFNHAETRTDSMIYKLEIMTIELFSMYGKQFKIDPQDFQDSEPDILANSASSIIERIKENSDQCAAALRSLCRRKKGLTVEEASLIGVDSLGIDVRAFSGLEVKTVRFSFNAQALSERSAEKKIRRMLFPRYQRKNVKASTEDES

SEQ ID NO: 72474 - protein, 551 aa, Zea mays; identical to SEQ ID NO: 58625
  Clone ID: UC-ZMFLB73093G12_FLI.pep

SEQ ID NO: 72475 - protein, 637 aa, Zea mays
  Clone ID: UC-ZMFLB73106C12_FLI.pep
QSPTRRGSPPPPFCSASSPAMAPGTDAGYGQWAAACPPLRRNLQLLSPDEVELAKMLLNEGQIHLFEHWPEPGVDDDNKRGFFDQVRRLNSSYPGGLVSYIQNAKKLLADSKEGKNPYDGFTPSVPSGEVLTFGNDNFVSLETAGIKEACNAAFVLVAGGLGERLGYKGIKVALPRETTTGKCFLQHYIESILAFQEASCKMVDEGCQTKIPFVIMTSDDTNALTIKLLESNSYFGMEPSQVKILKQEKVACLADNDARLALDPSDKYKIQTKPHGHGDVHSLLYSSGLLEQWKTEGRKWVLFFQDTNGLLFNAIPSALGVSATKGYNVNSLAVPRKAKEAIGGITKLTHVDGRTMVINVEYNQLDPLLRATGHPDGDSNCETGYSPYPGNINQLILELGPYIEELKKTHGAISEFVNPKYTDSTKTAFKSSTRLECMMQDYPKTLPPSAKVGFTVMDTWLAYAPVKNNPEDAAKVPKGNPYHSATSGEMAIYRANSLILRKAGAQIADPVVHTFNGQEVEVWPRVTWSPRWGLTFKSVKEKVHGNSSVSQRSALVINGQNVFLEGLSLDGTLVVNAADEAEVKLTGHIQNKGWTIQHVDYKDASEKEEIRIRGFKLEKIEQLEVNYTEPGNHSLSA

SEQ ID NO: 72476 - protein, 682 aa, Glycine max
  Clone ID: 701106242_FLI.pep
ECLQESNSLGSMHFVCNSWVYNSKVYEKDRIFFASETYVPSETPGPLVTYREAELQALRGNGTGKRKEWDRVYDYDVYNDLGNPDSGENFARPVLGGSLTHPYPRRGRTGRKPTKKDPNSEKPGEAYIPRDENFGHLKSSDFLTYGLKSLTRSFLPALKTVFDINFTPNEFDSFEEVRALCEGGIKLPTDILSKISPLPVLKEIFRTDGESVLKFSVPDLIKVSKSAWMTDEEFAREMIAGVNPCVIRRLQEFPPQSKLDPSVYGDQTSKMTIDHLEINLEGLTVDKAIKDQRLFILDHHDTFMPFLRRIDESKSSKAYATRTILFLKDDGTLKPLAIELSLPHPGQQQLGAYSKVILPANQGVESTIWLLAKAHVIVNDSCYHQLISHWLNTHAVIEPFVIATNRNLSILHPIYKLLFPHYRDTMNINALARQSLINADGFIEKTFLGGKYAVEISSSGYKNWVFLDQALPADLIKRGMAIEDSSCPNGLRLVIEDYPYAVDGLEIWDAIKTWVQEYVSLYYATNDAIKKDHELQAWWKEVVEKGHGDLKDKPWWPKMQTLQELIQSCSTIIWIASALHAAVNFGQYPYGGFILNRPTLSRRWIPEEGTPEYDEMTKNPQKAYLRTITPKFQALVDLSVIEILSRHASDEVYLGQRDNPNWTSNPKAIEAFKKFGKKASRD

SEQ ID NO: 72477 - protein, 210 aa, Glycine max
  Clone ID: 701127134_FLI.pep
LTKTSHLFQQPCRMQSRILCFSTRRLPLHQRRFLSHFIPDHQYDPPFSPSPKPYYKSKKNHAEKKKKNNSENGDPNKNGAPKLPFKSNLPFDFRYSYSESDPSVGPISFRESPKFSPFGPGRIDRKWTGVSAPVQGEPDRERVEEERNRILGEPLSEVEVAELIERYRHSDCARQINLGVSLFPQLFSFFFFFFHWRKEQKDVFVFLNIN

SEQ ID NO: 72478 - protein, 489 aa, Glycine max
  Clone ID: 701118826_FLI.pep
RSYWNGESTENLPFESDEDEEEEEARNGGGDKEEQIPVALPVTGFDIVIDALPSGTINDLHEIAKRMVAGGFGKECSHVYSSCRREFLEESVSRLGLQKLSIEEVHKMTWQDLEGEIEKWIKASNVALKILFPSERRLCDRVFFGFASASDFSFMEVCRGSAIQLLNFADAVAIGSRSPERLFRILDVFETLRDLIPEFEALFSDQFSVSLRNEAITIWRRLGEAIRGIFMELENLIRRDPAKMAVPGGGLHPITRYVMNYLRAACRSRQSLEQVFEDYGLKEYTKLEDRVPSSSSLSVQMDWIMELLESNLEAKSRIYKDPALRYVFLMNNGRYIVQKTKDSELGTLLGDDWIRKHAAKVRQFHVHYQRCSWTKVLGILKLDSNGSSLPPNGLAKSMKETLKLFNTVFEETCREHSSWFVFDEQLREEIRISLEKILLPAYGNFVARFESVAELGKNADKYIKYGTEEIQATLNGLFQGSSGSTGSRK

SEQ ID NO: 72479 - protein, 521 aa, Zea mays
  Clone ID: LIB3060-071-B7_FLI.pep
RRRANIGDLARALGRRQSSTRMEGEAETVVGSCSKPCGPLEDYYIPDYILKPGAQQVLVDHAAPCPVVVFINSRSGGQLGSSLIKTYRELLNEAQVFDLSKEAPDKVLHRLYANLERLKMEGDILAVQIWRTLRLIVAGGDGTASWLLGVVSDLKLSHPPPVATVPLGTGNNLPFSFGWGKKNPSTDQEAVKSFLGLVKHAKEIKIDSWHIILRMRVPEEGPCDPIAPLDLPHSLHAFHRVSSSDSLNMEGYHTFRGGFWNYFSMGMDAEVSYAFHSERKKNPEKFKNQLTNQGTYAKLGLKQGWFCASLSQPSSRNLAQIAKVKIMKRAGSLWEELRIHHSIRSIVCLNLPSFSGGLNPWGTPGTRRAEDREFTAPFVDDGLLEVVGFRDAWHGLVLLAPNGHGTRIAQAHRIRFEFHKGAADHTFMRVDGEPWKQPLPKDDDTVVVEISHLGQVTMLANEPCRSKSVNDQSSLSPAHDSHGDDKDIVEEDEDEWEDGRRKFGAADTFKIPDEIDIAHFS

SEQ ID NO: 72480 - protein, 242 aa, Zea mays subsp. mexicana
  Clone ID: UC-ZMROTEOSINTE088F07_FLI.pep
GHAATFTRRLRDPPVSKRRQYRSMIGSLLYLCASRPDIMLSVCMCARYQSDPKECHLVAVKRILRYLVSTPCFGIWYPKGSTFDLIGYSDSDYAGCKVDRKSTSGTCQFLERSLVSWSSKKQTSVALSTAEAEYVAARLCCAQLLWMRQTLRDFGYNLSKVPLLYDNESAIRMADNPVEHSRTKHIDIRHHFLRGHQQKGDIEVYHISTENQLADIFTKPLDEKTFCRMRSELNVLDSRNLD

SEQ ID NO: 72481 - protein, 516 aa, Glycine max
  Clone ID: 701126409_FLI.pep
VTHVSSLQRERLRFNQAMKPYMLSFSACLICLTKNCTRCLEYAMSRISYWCDGKTGGWYLGRSCSLRYETYLFFELIFHDAPAPQPSQPAVTPTKDFPKKTNPSRNIIVIVVPVFAVAIVVVGLIVLIYNYFGARRPRHKPIQSEGDGEGDGEGEGELDNDIKTDELAQFEFATIKFATNNFSDANKLGQGGFGIVYKGTLSDGQEIAIKRLSINSNQGETEFKTEISLTGKLQHRNLVRLLGFCFAKRERLLIYEFVPNKSLDFFIFDPNKRGNLNWERRYNIIRGIARGLLYLHEDSRLQVVHRDLKISNILLDEELNPKISDFGMARLFEINQTEANTNTVVGTFGYMAPEYIKHGKFSVKSDVFSFGVMMLEIVCGQRNSKIRGNEENAEDLLSFAWKNWRGGTVSNIVDTTLKDYSWDEIKRCIHIGLLCVQEDINGRPTMNSVSIMLNSSSFSLAEPSEPAFLMRGKSQLPMIMLSGSEQYSEATKSSDSGSQFAQGSSNKAPITEPYPR

SEQ ID NO: 72482 - protein, 873 aa, Zea mays
  Clone ID: UC-ZMFLB73278G05_FLI.pep
SLTNPPPSWTGTDVCGGVSFSGVTCNGAARVTGINLAKLHLSGTLSSSLANLTALQSLQLQGNALEGDLPSLAQMGSLETLVLDGNAFSTLPPDFLEGLPSLLKLSMDDLPLEPWSIPDAIAGCAMLQTFSASNASVSGPFPAVLANLTSLQTLRLSYNNLTGVLPVGLEALGSLETLQLNSQRSNGMLSGPIDVVAKLPSLKTLWLQSNSFTGPIPEFDPNTQLETFNVRDNSLTGPVPPSLVGITSLQDVALSNNFLQGPKPKFAAKTVDIDSGNGFCHEDPGPCDPLVTTLLGVASGFGYPLQLKKWAGNNPCDPWPGLSCIKMDVTQIKLPRRNLSGLISPAFANLTRLQRLDLSNNRLTGVIPDALTTLKSLNYLDVSNNRLTGQVPEFKQHIKLMTAGNSFGESGGDSGGGGSNVRSSSSNPTGSHNSKSNAGMIVGILLVVILLVICVGLFLHHRRNKNVDKFSPISTKSPSGESEVMKIQVVGTNGHSNISGSVGSTELYSHSSADNTSIADLFESHGMQLPMSVLLKATNNFDEDYILGTGGFGVVFKGTLNDKLVAVKRCDSGTMGTKGLQEFMAEIDVLRKVRHRHLVALLGYCTHGNERLLVYEYMSGGTLRQHLCDLQQSGYTPLTWTQRMTIALDVARGIEYLHGLAQETFIHRDLKPSNILLDQDLRAKVSDFGLVKLAKDTDKSMMTRVAGTFGYLAPEYATTGKVTTKVDVYAYGVILMEMITGRKVLDDSLPDGETHLVTSFRKNMLDKEKFRKFLDPTLELSAESWNSLLEVADLARHCTAREPHQRPDMGHCVNRLSSLVDQWKPTNIVDDDDEEGGTSEMGLHQHLEIWRCDDFTISDSDSFSAHNTSRKYH

SEQ ID NO: 72483 - protein, 422 aa, Zea mays; identical to SEQ ID NO: 66178
  Clone ID: LIB4606-009-H9_FLI.pep

SEQ ID NO: 72484 - protein, 295 aa, Zea mays
  Clone ID: LIB4606-009-B2_FLI.pep
SLHNIANMQIILELTRCRGRNSRGGLHKCAPCTAMPNNKIVAANMEEKGAGGKAAVPHDELPRFTIFLIPNRREPPLDLVELVCLHHRISLGNGVPGSSPVVELAVVLVGVAVECAVQVPTPAVESRKSNPLPAGAAPVRPYLPPFGDRRHPLAGSGNISGLLHVHCLQLNLGNSYYRVAASNNRLHDGVAAVHDAVDRGGSQLGLILLRYHLLVALGAHVHGRRAAEEATVIDAEDGSLGGLAPSLLVLHGFLNSDETALFAIPLRRSPRGRRGGEGRGIAGNSVGFEMGPAGL

SEQ ID NO: 72485 - protein, 108 aa, Zea mays
  Clone ID: UC-ZMFLMO17211E01_FLI.pep
KCHFQGNWIDTAEEIDDLFLGDAEVWRRPSFGTAGPLGGDHPLVTKEGHHVLDVIFTTPIQDLGQVAEKLDKVDGVVDHGIICSNQPYAVIASKGEVQVLDEKSSVIQ

SEQ ID NO: 72486 - protein, 375 aa, Zea mays
  Clone ID: UC-ZMFLB73027B03_FLI.pep
ARHHRRRLPGERPPRAPVPADVPLPVPRRRRVHEPAAAVPQPHRAGRRRPPAPRRPVRDLRPRRRRGSRRRRRLLLLRDVGEGCGGERSRRRVGIPPQAVHVHQVPVADAVPTVRRHQGLLRRVPLRHQRHDQDSAGVSGLQGAADPGREAGRRAQQPVLPDGHGQLLEERRARLRRRHGDGRDAVQRDDHQPGHAGVVLAVADRPVPAMAHLPERQPRAPPRRSPLPLRRLPRVLLPRERGARGAAHHLLRRLQQPAGAGDPAAAAAPRVGRVRLPDGQGTGVGRRPQGVGPRRRRHVPGALLLPGPRHAAGQEAVDVARRRHGDIRQRQGRGGGVDAQWLRHPCAGQVYQVTATGQQQLLVDRHFNVTVRYAE

SEQ ID NO: 72487 - protein, 168 aa, Zea mays subsp. mexicana
  Clone ID: UC-ZMROTEOSINTE119D06_FLI.pep
SSRHKGPPVQIRLDKEVANKLLGSSNLLHSLITLDRPLKLHTNVLFVVAMNLHQLPEIKLGGLEYLHLADEDVLKWEDAGGRLLNLFANNFRNELRNKFFKVTCRSLVDHNLNHLAANLPNLGCLSIAGSLDLVWAPLGKTNAEQTQHVVVGCLDINMGFNQCLPLLY

SEQ ID NO: 72488 - protein, 196 aa, Zea mays subsp. mexicana
  Clone ID: UC-ZMROTEOSINTE076H10_FLI.pep
EAAAAAAEAEEEEPRQAQKVAAPPSTPRGKKRDGVSGVTDPAPPAAKAQVVGWPPVRSYRKSCFQQQQAAAGAKGKPAAADEGAPGPAGGGVFVKVSMDGAPYLRKVDLGTCGGYRQLREALEAMFLCFSGPGSGSGDASGGGSPSDFAVTYEDKDGDLMLVGDVPFGMFIGTCKRLRIMKGTEARLGLGSAKNND

SEQ ID NO: 72489 - protein, 57 aa, Zea mays subsp. mexicana
  Clone ID: UC-ZMROTEOSINTE099F01_FLI.pep
ESARCLYIATQNRNRVTRCVLLLVDLLIESMGVFGWLQADTVAAVWTAAAAIHREKN

SEQ ID NO: 72490 - protein, 287 aa, Zea mays
  Clone ID: UC-ZMFLB73251C10_FLI.pep
AIQEPLLFLLSAYSLPESTMRSMLSLSSAPPPPPGAQDAAGLHAAVAALAPPHMLPQGLSPDLTAALLAKDRGNSFAIMEPYRHGMSLELLKARAYAVYPRASLFNHDCLPNACHFDYPDRPGPGNTDIVVRALHDIPEGREVCISYFAANWRYADRQRRLLEDYGFRCECDRCQVESQWKDDDDNNGDDGDDTMEEEGEDDVGDRGDDGIEEEEGDGATNGGDDDFPHAYFFVRYLCDNEGCWGMLAPLPPSPNGDLSHVFECNLCGKLRKEEDVIPDEGTSGMVH

SEQ ID NO: 72491 - protein, 80 aa, Glycine max
  Clone ID: UC-GMROPIC073G03_FLI.pep
SVMKINTVPCKRACTFLIIYTQPRQYQMGERVNYSLATIKEIEVTVTDIFLMQVDIYKMFRTARHDTNHEVYENHNHLVF

SEQ ID NO: 72492 - protein, 553 aa, Zea mays
  Clone ID: 700075928_FLI.pep
ARLPETGHGIRSVRPMPAPVAPVTSRLKREDCPRTKHDSLFSPWKVLVGPSDWRDHAAGKEGVQRYRIRNLPDNFPGLYELGVACAADEGVRSRRRDARGVVVVYLGQADSVRARLQQYGRSGSHLDTTNSPGSSDRDAANALAEGPGLFREVFSRGYSVVFRCALMDNKQEAEKTEALLLRVFDYAWNKLQNGACRRQEILHKLELRAANHRSLLSRVSDMKQKIFGQKAGINIKGSGPANTSPSIIKSMLPRVRTIVRFRPQSVNPNNSEGGITGIPYANRQAHRRKSKGYQVKKFDVTKRRTVPIHDSNSVCGVLLEDGFCLEHPVHGRKRCSLHKGKRVKGSPKSSPTSHPCQVGIAITEFCLTEDLDSSVPKQESEIRPKNMSTTLKEPQRQSDNLESQKVNTGEASTEDGTQEVSRDACILEEKAFFHADSESQEQQPSGRMWFELLKSQRKPASAHPSRRGLGSQITAMTDNRSCKMVSIAGMERTEKDSGVEVTAASFSRSSGWPCTCGARMSDGSRCMNMPIEGRKRCALHKGQRAAFPPTPSA

SEQ ID NO: 72493 - protein, 565 aa, Zea mays
  Clone ID: 700204574_FLI.pep
AAAHEDVRGLDDLAVAVLGEAAHEADVRHLHLGAAVGASGPVHAHRPRHGHALLHLPRHLQRPRLGLDDGLPAELVARARHQAPEQQRRLRREALPLQQRLREQRVQPPVAHVGEHDVLLHREPELARAVLVGEARQLEHVRGLQPTHGHVQAHVRQAFLLLRVHAEVVPPLPLLVDEVLRRGALQHPVGHPLLHLRPEHLHPEFVDEPHHARLLPVAPEPEVPVRLEDGLARGDDVVSGDPGVERQGLGPPLGADEPAHQKVEAELAVLDGRHVGEVVDVRVLVQVVRADHAHVPFPRQVGDGGVPLGVACDVGGEQVGVGARVDDLVGVDAGERVADGVAHVVHAALQAGEADGAEAVQDGRDVRERHPADLPVLPGRHVRAPVGAVRLDDARQVPRLLARRHAVGQLQPHHEAPVLVLAAVEEAEPLEADVDVVLGELGGVDHVHGDLGEVPDAAVHEQRHGLLLQLHLLVRVQPGPVPLLEGPVPSLPRLDPRLQPLRGDLIIPCRRRGRRRDGDGRSGAAGAAPGRRVRGGGQEALQGRCGGHGWCWWWRWHCCCPCAVV

SEQ ID NO: 72494 - protein, 169 aa, Zea mays
  Clone ID: 700217057_FLI.pep
RRACQPMEELRAAVTAHLDQVAGLVQALSSELRRGIGPAADNLRAFIRAVDWTEPWLMCLMAFHVVLLLTAVGFRRNANFQLFLLFLAYSGVYLAEKMNRYLGENWKSFTSRNYFDRSGVFISVVWSGPLIVISIVSVISSLIALCRLMVKWKRAELRHRARLAHDKKD

SEQ ID NO: 72495 - protein, 223 aa, Zea mays
  Clone ID: UC-ZMFLMO17054B01_FLI.pep
LALPLMSILNIAREFGLQHTTPSIDDNDLCSVCLERSCSVAAEGCSHEFCIKCALYLCSTSNIRVEFTGPPGSIPCPLCRNGIMSFTKLPSTPTEGLKSGSALTFCNPCILNTRSMDSPATFSKAEIRRNRVAAVSSELVCPITCSPFPSSALPTCRCSDDDPCGDTDVQDGPEFQSPRPSHSASMELDKMGEGDLDRASCSGMFWSRRSCHREQQCDAEINA

SEQ ID NO: 72496 - protein, 831 aa, Zea mays
  Clone ID: UC-ZMFLMO17269A09_FLI.pep
EQSTPSSHYSFRICSTPPPPCPCPSQAASHHRRHTQHQHQHQRRRTTTGAIASASASAGASGGPGDADWAKLLAFFSSAAFLAIKLRSSSKVTWSLPMGLDNTYGDLSGMFYGGLSYDGYTDHSSANDYFRFADPLPATVPQMAAEACSNPSSTVSRANTETDNPEDWEFISDESLDYISRMLMEEDIDEKVSMYQAESAALRAAAKPFYDILGHKFPPSPDRQLISWSMDSPSESSSSICTQSVASTVTSSSVGGTVDSNRRYDIGLSEQLEAYRGLCGQASNPLVGTSSDASNAVDVLEDPLITNGQIPEYLFESLPTWDFRRGIEEAQKFLPINNKLVIGLEAGGIARPQEARKDVPLNAKKADALKVKKNRQSEDLDVIEGRNIKLSAFCSDEPDWIEMFDDLLLQTEKKATDLRELMRNEASKNSQVTQTKGPSGPRPRGRKPTKKDVVDLRTILIHCAQAVAADDRRTANELLKQIRHHSKPNGDGTQRLAHCFADGLEARLAGTGSQLYRKLIAKRTTASDMLKAYHLYLAACPFKRLSHFLSNQTILSMTKHASKVHIIDFGIYFGFQWPCLIRRLSKREGGPPVLRITGIDVPQPGFRPTERIEETGQRLAEYAEKLKVPFEYQGIASKWETIRVEDLKVGKDEVVIVNCLYRFRNLIDETVAVDSPRNRVLNTIRQVNPAIFIHGIVNGSYSVPFFITRFREALFHFSALFDMLETTVPRDDAQRALIEREMFGREALNVIACEGSDRVERPETYKQWQVRNLRAGFVQSPLNQEIVMKAKDKVKDIYHKDFVIDEDSGWLLQGWKGRIIYAISTWKPKNN

SEQ ID NO: 72497 - protein, 268 aa, Zea mays
  Clone ID: UC-ZMFLMO17265A05_FLI.pep
FVLQYLCHIMGFQTIPVVPDLVVDKSEVETSQVAGSDSIVIERVETNLSKEPFLLVPLENKEEKESLGIICYLENNKVDVPEAFSPRRDILELSISSKSTDDSLSLGCETPRESIFDPFAPGPEEAACAPKKKVTRGAQVPPRRKLNFDSGDYPVKRLSFDCSDSEEEDQYIEVIHKMILDLLILDVPLGGQKETGKNATDLGLHGSCKTPDSKPLLTGIASTCPDAPLRPSLKALKLSPGICRKIDFDFDAVSGSGSLSSSMDKESN

SEQ ID NO: 72498 - protein, 460 aa, Zea mays
  Clone ID: UC-ZMFLB73300E06_FLI.pep
PKALNLSSQKLPPLSSSATASPPPPPDGDDKPDPIKLAFARAAAYKKGRDSHSPSPSPAPAPPPTPPPQSSPPSQPQASVSEPGSKEAFKRALEYRNGNGAGAGAAGGDSPLLGGSPDFGQNALISEEVSFGKRGGYEFDEADFLGLDFFEKKRSKGLPPGLAPAFEPLRDDDFPEVDIIVGDPSKFDKSPRRTEIQPVDNGESGEASQSTTKPNEADKAGIAPPSTVIETEEDEDVYRPTVRSWGMFPRPQNISKAYGGGRNIRLGGETQSAEEKAAKDKRTKELIAAYRNRQNMVIDAKTKAECIKALREGDEMMNTGRLKQALPYYEKVMDAVDFKTEFHGRAALQWSICLDSLCRSKEAMSMYSKLKNHPNSEISKKANMFVFSFQAMDFMKVSSIPVPKSTGYETYFTKFGSKKNYYASLEEPEVGIEQIVPYIIFLVSPIFLVAFVALRKSFQL

SEQ ID NO: 72499 - protein, 239 aa, Zea mays
  Clone ID: 700210189_FLI.pep
RKTDCPPAATTKKHTDVPGHATSSSSRPRAWVLTSARPSCQARWNRQRMHMHLFDQTGSGPGRTCMTHRIKTKPCMFHRPAAPVGPRTARRRPATSSRALDSMARVVPSVEKSTCPGRGNAGRRPTCRGGLQVQVKACRCEAARGQVAPCTNRCRLFSPARAGSGGGARRGRPCDASGYASLRRHRRADRMSYPVSGPGTVLIWTPTWHRAALANILSGAWCPMRKNREIRSCIIANRV

SEQ ID NO: 72500 - protein, 77 aa, Glycine max
  Clone ID: 701124312_FLI.pep
RGYMIWSLLDNFEWTSGYDIRFGLYYVDRGTLERIPKLSVQWFSSFLNNSSHPNITEHLSKQHIESKDVRNVGFDFI

SEQ ID NO: 72501 - protein, 259 aa, Zea mays
  Clone ID: UC-ZMFLB73004G06_FLI.pep
SGQARDRRDLTSARHGPISLKKEKKQPDGLTSLVDGSVRSSQPERQIGLLPGVHGDAAGRVRRRSGVWPEATGPAEEHLLVVGHEERHGAQQPPRGPPQLVGAGARVLVLRERCRRRVRLDADGVQAGAVQRQRRHVGVVAVAVAVVGARCVEPQRAPGQRALPPVRVLVPAQRLRAEELALAVVAREHAGRLAGGVGLRAAAVAVVTVAVVGNGEREVEADRAGGVGRLLAADLGLGQLVALLLAHHLLVVHLATVFP

SEQ ID NO: 72502 - protein, 161 aa, Zea mays; identical to SEQ ID NO: 60806
  Clone ID: LIB3059-026-H6_FLI.pep

SEQ ID NO: 72503 - protein, 159 aa, Zea mays
  Clone ID: 700624223_FLI.pep
RKMARKPLDYEELNENVKRVQYAVRGELYLRASELQKEGKKIIFTNVGNPHALGQKPLTFPRQVVALCQAPFLLDDPHVGLMFPADAIARAKHYLAMAPGGLGAYSDSRGIPGIRKEVADFIHLRTTILPAEEDFPAIMSSFKKFNDSFMEQYEGYSRL

SEQ ID NO: 72504 - protein, 459 aa, Zea mays
  Clone ID: UC-ZMFLB73256H07_FLI.pep
ARLLHLATGDRTINSSARLRFVTRRRRPPPVPVDAVRSASTKVSKPPPKPKRRAKSPIPKRVISDVFKEAKAATKRFSSPQRQRKPMSPRSPDDSPPLGFASLRAPSKLKINTRASSWPRTNLDSGPARVAAPEILERWTVDRSELLIGHRFASGAYSRLFHGIYKDQPVAVKFIRQPDDGEDDELSAKLDKQFTSEVTILARLQHRNVIKLVGACNCPTVFCVITEFLSGGSLRAFLRKLERETLPLEKVISIALDIARGLEYIHLQGIVHRDIKPENILFDGEFCAKVVDFGVACEEKYCNLLGDDPGTYRWMAPEMYKHKPYGRKVDVYSFGLVLWELVTGSLPYQDMTPLQAAFAVVNKNLRPAIPLSCPAALKLLIEQCWSWQPERRPEFQQIVSVLENLKTVLERDGTLDKIPGSICQALEPNDQNKKKAGNWIQRLSYAQPAFSGPPPPKLL

SEQ ID NO: 72505 - protein, 366 aa, Zea mays
  Clone ID: UC-ZMFLB73242B04_FLI.pep
SVSPSFTSRLPLLEPKKLKPGVCFFPKAAMIPAVADPTTTLDGGARTPLLPETDPRGRAAPAGARQNRPAAAAAATATMTVLTAAVSAVLLLVLVAVTVLASQEGVDGQGGGGVVAVEVAASRGVAEGVSEKSTAPLLGAGAGAALRDFSWTNSMLAWQRTAFHFQPPKNWMNDPNGPLYHKGWYHLFYQWNPDSAVWGNITWGHAVSRDLLHWLHLPLAMVPDHAYDSNGVWSGSATRLPDGRIVMLYTGSTAESAQVQNLAEPADPSDPLLLEWVKSDANPVLVPPPGIGLTDFRDPTTAWRAAPNDGAAASWRVAIGSKDRDHAGLALVYRTEDFVRYDPAPALMHAVPGTGMWECVDFYPVA

SEQ ID NO: 72506 - protein, 384 aa, Zea mays; identical to SEQ ID NO: 63376
  Clone ID: UC-ZMFLB73063H12_FLI.pep

SEQ ID NO: 72507 - protein, 410 aa, Zea mays
  Clone ID: UC-ZMFLB73170B05_FLI.pep
VENQISKRERAHTAKMSLIRGMGNVAKRWKELNGLNYWKGLVDPLDLDLRRNIINYGELSQATYTGLNRERRSRYAGSCLFNRRDFLSRVDVSNPNLYEITKFIYAMCTVSLPDGFMVKSLSKAAWSRQSNWMGFVAVATDEGKELLGRRDVVVAWRGTIRMVEWVDDLDISLVPASEIVLPGSAANPCVHGGWLSVYTSADPGSQYNKESARHQVLNEVKRIQDLYKPEETSITITGHSLGAALATINATDIVSNGYNRSCCPVSAFVFGSPRVGNLDFQKAFDSAADLRLLRVRNSPDVVPKWPKLGYSDVGTELMIDTGESPYLKAPGNPLTWHDMECYMHGVAGAQGSSGGFELLVDRDVALVNKHEDALRNEFAVPPSWWVVQNKGMVKGKDGRWHLADHEEDDD

SEQ ID NO: 72508 - protein, 520 aa, Zea mays
  Clone ID: UC-ZMFLMO17292E05_FLI.pep
ASLLSRESEVNGTAAAATQCTSAPTCVLSCRAATELPHKSSLSLLLFAACKAPRTDGGDDSQGSSARARQQQHAAVLRSESGEKTLFSGHSSRSPDEMDGNARSAATNQKKPVVADDDLVELLWHNGSVVAQPQAHQRPAPTYDPDRPGTSGLTGEETAAWFPDTLDDALEKDLYTQLWYSTIADAAPQHEGTLPGPTSQPSPSPPVGSSGVESSWAGDICSTFCGSNQVLRTPARIRGKDAALQSELPSNTGAHDGTSSSGGSGSNYGGSGLPSDSVHVQKRKGRCRDDSDSPSEDAECEEASEETKPSRRYGTKRRTRAAEVHNLSERRRRDRINEKMRALQELIPHCNKTDKASILDETIEYLKSLQMQVQIMWMTSGMAPMMFPGVHQFIPQMALGMNPGCIPAAQGLSQMPRLPYMNHTLPNHIPLNSSPAMNLMNPLNAANQVQIGHLRDAGSHVLHLDGGRAAVVPQVPGPGPHVVHGHQIAQAEEHNKILEVAASTVIPTSKAGQPPTFHGV

SEQ ID NO: 72509 - protein, 175 aa, Zea mays
  Clone ID: UC-ZMFLMO17342H06_FLI.pep
VISHSSFHVNGEQAVKETGSESIDVDKRLNMVREEIGVRSTEPNLIPSGPIDSDTVKPNVVEANITFQKPSSTDAIKLPTIPEGNFSTLETNNGFKQEAAPAKEILDVTSFRQRAEALEGLLELSAELLEHSRLEELAIVLKPFGKAKVSPRETAIWLAKSFKGLMNDEASRSST

SEQ ID NO: 72510 - protein, 550 aa, Zea mays
  Clone ID: UC-ZMFLMO17209B10_FLI.pep
APYKLRRRNSETLRAQYINTKELRVCVGTWNAGGKAPPNDLDIAEWLGTGGDAEPADIYVLGFQEVVPLNASNVFGAEDGRPARAWESVIRGALRQAQPPAPRYRCYSHPPSPSRFEPPIGAAEELLPGGTDTETDTDEDVPLGDPVAAATPTPRKLSRLNHFSVVVGENENGSSELNGDELDDGPDQPPQQLSLQQRALLRSLSRADRVGVLWPEQPLDLLPASSASASASASFRASKSFSRAAYRSSFRGSSRVAADVVDDLPMIPDLDLDGALRKKGRSPFVRIVSKQMVGIFLTVWVRRGLRKCVQSLKVSTVGVGAMGYIGNKGAVSVSMSVYQTMFCFVCSHLAAGEKPGDVHKRNADVHEIRRRTRFAAPGDLQLPRNIHDHDRIFWLGDLNYRLDASYERAHELISAGSWRELAETDQLKRELRKGRAFDGWTEGVLEFAPTYKYELGSRRYVGVGDHQGQSQSQRGGGRRTPAWCDRVLSYGKGLRLLGYRRSELALSDHRPVTATYAAEVEVFSSRKLQRALTLTDAEVEGGQVVPDLDF

SEQ ID NO: 72511 - protein, 377 aa, Zea mays
  Clone ID: UC-ZMFLMO17219C09_FLI.pep
HVHRGRLHNNQDVAVKVQYPGLEQRMKIDIMTMSFLSKMVSWVFPDYKFDRILIEFEKSMTMELDFTREAKNSERTASCFRKNSVVKVPYVFWQLTTREVLTMEFCYGHKVNDLDFLRKTDISPTKVAKALIELFGEMIFVHGFVHGDPHPGNILVSPEGHGKFSLVLLDHGIYRELDQKFRLDYCRLWKALILLDSNKILELGEQFGVGKYAKYFPVIFTGRTIESKSALGTQMSGEEQRRLKEDLNSLGMDDISSFMESLPPDFYVILRTDGLLRSILGNLGAPRHVRLLTYARCAIHGLEKQHKMESGLGDVQLCSGAIRRMFLNVKTNVIYLRLRVIIEIAVLLAKANGAKQKVLNTLRQMLLEISQGFHRLI

SEQ ID NO: 72512 - protein, 161 aa, Zea mays
  Clone ID: UC-ZMFLMO17256F05_FLI.pep
LISFRGGQTMKIAYICVDPGIPVFGCKGASIHVQEIIRAFQNQGATVTLFAAKLGGEPPKDLVDLPVHCLPKVPKGDLAMREQGLFQQNQTLQNLLTQAAPYDLRGAMVTNATLNRANLTSANFAFAKLYDVDVTGATVEGMNIQNAEIYNTGIGIGGGDD

SEQ ID NO: 72513 - protein, 492 aa, Zea mays
  Clone ID: UC-ZMROB73070B01_FLI.pep
QKQAEVLWPRLVANKLFRKTSGSHAFVADFPATDGDGDVVFGGTEFDGGGCSPDPDDADASRCVKRARPQPQPQERNKKTLKYKLFASTWNVGGVAPPDELDLSDWLDGGGGDDDDGPYDMYVLGFQEVVPLRARNVLGADKKRVGMRWIELTRAALNRSSSSHAQRGGGSGGGSGSGDGGGGGRQKVHPVRDGGGGGGLACRDYRCVVSKQMVGVLLTVWVRSDLRRFVRRASVSCVGCGVMGCLGNKGAVSVRFWLHETSFCFVCCHLASGGRDGDEAHRNADATEILSRTAFPRGQALNLPLPHKILDHDRVILLGDLNYRISLPEAKTRLLVERQDWKTLLENDQLRAEVRRGGAFQGWSEGPIAFSPTYKYCPNSDAYYGCATASATADARRHKRRAPAWCDRILWRGEGIRQARYGRCESRLSDHRPVRAVFTVEVGAPAPGSNLNSLRSFFMSERFDGAGSRSPAADQLLRRDDDVNSARFSDAL

SEQ ID NO: 72514 - protein, 340 aa, Zea mays
  Clone ID: UC-ZMFLMO17229E06_FLI.pep
TVAVVLFFLLVIPPFWEQLQILIGSLPKVGDRLENFFEDWHDRMEVKFFSQAFSVDDLPDSISALGANALSSLINLFSNSVTAVLQIIFILAIAVMMLLSPQAYRQGTLKLFPSFYRRRADEILTQSESSLGNWLTGIVINSFFIASLSGIGLWILQIKLVLVHALMAGILNFIPNIGPAASVVFPLMIAVLDAPWKIIAVLILYFLIQNVESYWLTPIVMAKQVSLLPAVTLIAQLFFASIFGLLGLIMTNNEELGKKFDKSVFPGTQGGPLEHVITAKAVAFGEALKPEFKVYSGQVIANAQAMADQLQKRGFDLVSGGTDNHLMLVDLRSIAMTGKG

SEQ ID NO: 72515 - protein, 239 aa, Zea mays
  Clone ID: UC-ZMFLB73018F09_FLI.pep
CVLLVSKRARDQEAESCSVSFVSCKNGFLQRERELGLPLGGNGGPGRRGGHGGGAARAHGAAPREADAVQPRVRAAVADAQAAPPRRADRAGGAPAPRERARGHRARPHRAGPPRRGRRERRPPHPDRRARRAPRLPQRHPRLHEHQRRRRRRRLPHSRRRRRRFLRPLPRLRRRHRPGRPPQILPREHVPVPALLAPDRAKSPWQRKTPSFVLFCFCFFFFFFFWCFRFSNLLVRWKN

SEQ ID NO: 72516 - protein, 313 aa, Zea mays
  Clone ID: UC-ZMFLB73022D03_FLI.pep
QTAVLMFHVIVMTGVGGYSYLYEPLWWVGMITMIVGEVANFAAYAFAPAILVTPLGALSIIISAVLAHVMLREKLHIFGILGCALCVVGSTTIVLHAPPEREIESVTEVWDLATEPAFMCYAAVVIAIAAILVYRFVPLYGQTHVMVYIGVCSLVGSISVMSVKALGIALKLTFSGTNQLIYPQTWAFSLVVISCIITQMNYLNKALDTFNTAVVSPIYYTMFTSLTILASVIMFKDWDRQNPTQIVTEMCGFVTILSGTFLLHKTKDMADGGLSMSSSFRLPTSSSVRFSKQTDEDGEGIPLRSSESFRSPH

SEQ ID NO: 72517 - protein, 270 aa, Zea mays
  Clone ID: UC-ZMFLB73010D09_FLI.pep
GGVTLLQSHYVEKVLSRFGFSDCDPAPTPYDPSVLLRKNRRIARDQLTYSQIIGSLMYLASATRPDISYAVSKLSRFVSKPGDDHWRALERVLRYLKGTMTYGIHYTGNPKVLEGYCDANWISDADELYATSGYVFLFGGGAVSWKSCKQTILTKSTMEAELSALDTAGAEAEWLRDFLLDLPVVEKPIPAISMNCDNQTVITKVNSSRNNMKSTRHVKRRLKSVRKLKNSGVITVDYVHTSNNLADQFTKGLSRNVIESASREMGMRPM

SEQ ID NO: 72518 - protein, 716 aa, Zea mays
  Clone ID: UC-ZMFLB73016E05_FLI.pep
KNIKPVPNPNREMAEYGERYQGNGDQATAEGGYAQTEYAAGAGGSPPSDSNPSVFSDHADGRSSQPQHETQSHDSGSSKSQERDRERDKGKDRERGRDRVREKERGRDRDKDRERGDRDRDRDRHHRDRRERSEIREHRDRSDDRDRRRSHDSERRRDRDRDGHRRHRSRSPSKGRDRDRRSSSHSRSRSKSKRVSGFDQAPTQQAVPIVAAGVIPGQLPGVTAPIPGVGVLPNLYNLAAGQFNPHVIQPQAMTQQATRHARPVYVGGLPPTANEQTVAIFFNGVMAAIGGNTAGPGDAVPSQPPLWPRGFIQQHPLDCNMMRNINFSNASYGPTTMWAPIQTGNISSESTMLPATQSAVYWNHYMNFVRNPLGSVQGNPFPDSFSGTNTSTPLQGSNTIPSIPVNLESAAEHSVQDINSPIKTSAPVTKPKKTKEQNYTAAEDLLLCTTWLQISSDPIVHTGQRKKGLWARIEKRYNEQRGEYPCRMNRALSSRWDKIRADVGKFSGCYARVLREKQSGLTDDDKTSKAATLFAHEENKPFHFMHCWHKLKGEPKWESICQGPFRGLHGKAIGSSGGPFIGVEESDSGSAGLTGKRPLCRDSSKSERKKAASSTTTEYLSRLQELTEKLIQRIIEKGEKKYKYNEQDMELEKKRLDLEAKKLSIRKRELRLKELSMAEQQLEMLERTREDEVDPEVWSMMKERKKHLQQFIFSFC

SEQ ID NO: 72519 - protein, 112 aa, Zea mays
  Clone ID: UC-ZMFLMO17169G04_FLI.pep
LATGMYILVQQSIGFTSKRRRRNLPKYPNGITSTIYTGEYIYSLKEPLHDFRIRQEFFQPDKFAVLQGDPANSGYIGDKKAGTLQPAGKYSDAMLPHSPPGGSEQQPIHTSE

SEQ ID NO: 72520 - protein, 701 aa, Zea mays
  Clone ID: UC-ZMFLMO17018A10_FLI.pep
PRAVQPSALFLLVLASLAVVVTMQDSNPFTSVDCQSSGSGTPSPAPSSSSSSNLNNSAFWSNVVALLDALPSAAAPSRFASISSGNGTTRAFVRGICRGDTLPADCAKYLQNATLTIQSRCNRSSRRAGIWYDKCFVSYADTNASTSEEQSFRSILYNTGEVGDKDAFETTYYALMRQLTARVVNGSGTATSPSSTSSSLRSVSPMFATGEAVYDAAAPNGTMYGLLQCMRDRTQAECEQCLKDSVGQLPSCCYGHQGGVVLGYNCNLRVEIYTYYDLAIDAPPPSGSGFIGQSQVKKRVHTRTILAVALPVGTVFAAAAILGVFMQRRKTNRKKTQRLGNDIKEENISFVAPGKLSIAVLRTATNNFSEENKLGEGGFGEVFKGTLEDGEEIAVKRLSHTSSQGFNELKNELVLAAKLKHRNLVQLLGVCLQEEKLLAYEYMPNRSLDTFLFSGNPGTRRQLDWSKRFGIICGIARGLVYLHEESRLKVVHRDLKPSNVLLDADMNPKISDFGLARAFSNDQSVDITRRPVGTLGYMSPEYAYWGNVSTKSDMFSFGVIVIETVTGRRNNSPYDQSAGSVSVLSHVWDKWRTGATTDVVDPTLGAEHYSESEVVTCIEVGLLCVQENPADRPDASAVVLMLSSPTSTPGDRRVPSRPAFVFSTASAWSSGGVQIGNNKHTSTSMVSVSDNEVTITELQPR

SEQ ID NO: 72521 - protein, 351 aa, Glycine max
  Clone ID: 701128902_FLI.pep
TPISDYHFIKSTINNQIYWSKTRTTVTQNHKDTQTQTQLKLLSIIINPNQRHQALVSPASITTVTTTRVTTVTTTTITTVSATAIATATATAISTAAAIASTATATVVSPSTTATTTTISTTATTTISTTSTASAATATTGKNLKLSPKRFFRKKEPSLVSRSDPPSFGSGSSSVDSSTANHKPSPGNQTPTSVLPDVSGEWSEVAAAAVDVRWDLAQALRLIDRDNDGVVTRQDLESLLTRLGASPSPGDVALMLGEVDGDGITVESLMSYVGSGLETGSDPDELKEAFEVFDTDRDGRISAEELLRVFKAIGDERCTLEECRRMIEGVDRNGDGFVCFEDFSRMMDLQR

SEQ ID NO: 72522 - protein, 337 aa, Zea mays
  Clone ID: UC-ZMFLMO17258G03_FLI.pep
CCDGVVHGQRVVQVQPLAHHHQLDELDVGGVQRAPHAPDPVLAVGRRRRRVDGEVVVGEERRARPGAARGGGAAGGLGADLLDLGDHVDGEVLGEEVGGEARARHQVGAGGPELLHLELARRHQHLHHVVHGRLLHHGLQLLLDEERELLDAEGARSGEGVEGEVDGGAAAGVPAAPGAAARERAALGSGDGGLAAVEELEHQHQHLVADGADGDDEVRRAPAGGGWGRLVARVQAAEELAEEEAARGQHAAVRVHQPALHAEGHVAEGLPVDEQVQVVQRQRLERVLRAHDLMCLCGLELELELDGPPVGPVGARGLCFLGPDSAAGAALEAGRDR

SEQ ID NO: 72523 - protein, 287 aa, Zea mays; identical to SEQ ID NO: 50942
  Clone ID: LIB3067-045-D11_FLI.pep

SEQ ID NO: 72524 - protein, 57 aa, Zea mays
  Clone ID: UC-ZMROMO17049C10_FLI.pep
QSSVQHKRRGPTSKALPDAVSWGSSRDIHPFTTRSAAYKMYGVPLVVLAYELKTCGL

SEQ ID NO: 72525 - protein, 146 aa, Zea mays subsp. mexicana
  Clone ID: UC-ZMROTEOSINTE082E02_FLI.pep
FSSEQEQPSEPSLWHKSAESVIEYLSPANSFLKQERREYYVSVLARTSTLLHTSLGPKSSGYTKSGPKCCLLARFCPSRRPQRAREPAGSMTWVFDSLLCEVVEVARRSSLLELLPVRIESIAGVRRRCVWPVARFPGLNGVAGPV

SEQ ID NO: 72526 - protein, 411 aa, Zea mays
  Clone ID: UC-ZMFLB73284B10_FLI.pep
KPLDNPELENWHNYLDYIEKEEDINKVIKLYERCVIACASYSEFWIRYVQCMEDKRSLDLANNALARATHVFVKKQPEIHLFSARFKELNGDIFGARAEYQHLYSDLCPGFLEAIVKHSNMEHRLGDKELSCSVYEKVIAAEKGKEQSQLLPTLLIQYSRFLFLAIRDLEKAREILTVLHEQLNLTKPVLEAVIHLESIFPCEKRIEFLDSLVEKFVTPESSQGELASLVDKEEISSIFLEFLDLFGDAKSIRKASTRHTTLFSCKRSILPSKKRKADDAVVSDRDKFAKTGSVQSATGTDPNASNPPVWPATSETSGHQWGASYAQQAAYPAYGTYDYSHQMPQPAPQTAAYGAYPPTYSVQAYTQQSYTQPAAIPAAPVPAVVPAPTPASAYPQQPAAAPQPYYGTTYY

SEQ ID NO: 72527 - protein, 164 aa, Glycine max
  Clone ID: 700787220_FLI.pep
LTEKSDVYSFGVVLMEVLCTRPALNPVLPREQVNIAEWAMTWQKKGMLDQIMDQNLVGKVNPASLKKFGETAEKCLAEHGVDRPSMGDVLWNLEYALQLQETSSALMEPEDNSTNHITGIQLTPLDHFDNSVSMIDGGNSCTDDDTEDVATSAVFSQLVNPRGR

SEQ ID NO: 72528 - protein, 132 aa, Zea mays; identical to SEQ ID NO: 38802
  Clone ID: UC-ZMFLMO17091A08_FLI.pep

SEQ ID NO: 72529 - protein, 158 aa, Zea mays
  Clone ID: 700156870_FLI.pep
PEGSPFFQWLHPGPGARMANADVRNAHFPLKNMLEMPLLLLGSGRSHAWLPSQRPGPGGFIAFLANSSCSVVIVVGPVTSVGVKRSDDTTICSSSLTAAVSLLPNKDLWHDEGSFFTRNLSLMSAFNLLKTEKLLPLSLVVITLIMGERDFPVALLTS

SEQ ID NO: 72530 - protein, 201 aa, Zea mays
  Clone ID: 700469088_FLI.pep
WRERKERKKERRKMVDAGDITAGGPPRAHEEEQAGTPAYGSVVLGGTFDRLHDGHRRLLKASADLGRDRIVVGVCTGPMLAKKEYAELIEPVDKRIKGVEDYIKSIKPELIVQVEPIEDPYGPSITDEKLDAIIVSKETLNGGLAVNRKREEKGFPLLKVEVVDLLSGGVEGEKLSSSALRKLEAEQAQQSETKSGSLEAS

SEQ ID NO: 72531 - protein, 531 aa, Zea mays; identical to SEQ ID NO: 53484
  Clone ID: LIB148-010-C10_FLI.pep

SEQ ID NO: 72532 - protein, 462 aa, Glycine max
  Clone ID: 700763827_FLI.pep
TPAASHIIRIRKATGGILLTASHNPGGPDEDFGMKYNLANGAPAPESVTNKIYETSKTLSSYKIADIPDIDLSTIGTQKYGSLEVEIVHSTEDYLKMLKDIFDFDLIKSFLKQHSDFKVLFDGLSGVTGSYGVDIFEKELGIPNSTQNCVPKPDFGGHHPDPNLVYAKSLVDAVDKNGVHFGAASDGDGDRNMIYGANSFVSPGDSLAIIAHHAELIPYFKKQGIYGLARSMPTSGAIDLVAKKKGVECYEVPTGWKFFCGLFDSNKMNICGEESFGTGSNHIREKDGLWAVVAWLNILAGVGQQTGTTPSIASIQKDFWKTYGRTFFTRYDYEGCETEGANKVTSHMKELITTKKDEFIGSTVAGRKVVEADDFSYTDLDGSVSKNQGIFVKFDDGSRIVVRLSGTGSSGATIRLYIEKHTSDESTYDMDAQDYLKDNVKLATDLLKLQEYVGRTEPDVKT

SEQ ID NO: 72533 - protein, 653 aa, Zea mays; identical to SEQ ID NO: 56213
  Clone ID: 700477929_FLI.pep

SEQ ID NO: 72534 - protein, 88 aa, Zea mays
  Clone ID: 700379405_FLI.pep
VGGGGGDGKIGGGAVKGGGSNSVGGAGSINSGGGVAGHGDGAGKSGSGGDGMMKAPGGGGCYIPRSDFEANPKEFFQGLHQQGGGGKK

SEQ ID NO: 72535 - protein, 167 aa, Glycine max
  Clone ID: 700835120_FLI.pep
KLENQTKPNQTKLIATPLIKQKNNPNFQNSQTQEQLEITTNKNKTNWSKTMNLDLVLPDKASLNEEVGDVLTLVALELDDLAKLLVLHHGSVAAELLLEVLEDLLVAELLLQPLHCGQTLLPIPLLNSNMHILLCSGGIRFSRLGKRVEWGGDLDFQINHVLCLLET

SEQ ID NO: 72536 - protein, 204 aa, Zea mays; identical to SEQ ID NO: 72277
  Clone ID: 700220258_FLI.pep

SEQ ID NO: 72537 - protein, 208 aa, Glycine max
  Clone ID: 700830067_FLI.pep
SKFIKCVTVGDGAVGKTCMLICYTSNKFPTDYIPTVFDNFSANVAVDGSIVNLGLWDTAGQEDYSRLRPLSYRGADIFVLAFSLISRASYENVLKKWMPELRRFAPNVPIVLVGTKLDLREDRGYVADHMGSNVITSAEGEELRKQIGAAAYIECSSKTQQNVKAVFDTAIKVVLQPQPPRRKEMARKKRHRRSGCSFVSIMCGGCAA

SEQ ID NO: 72538 - protein, 124 aa, Glycine max
  Clone ID: 700831219_FLI.pep
TAETGTYRWMAPEVIEHKPYDQKADVFSFGIALWELLTGELPYSCLTPLQAAVGVVQKGLRPTIPKNTHPRLSELLQRCWQQDPTQRPNFSEIIEILQQIAKEVNDHKDKSSHGFLSALRRAHH

SEQ ID NO: 72539 - protein, 107 aa, Zea mays; identical to SEQ ID NO: 50211
  Clone ID: 700455785_FLI.pep

SEQ ID NO: 72540 - protein, 238 aa, Glycine max
  Clone ID: 700871767_FLI.pep
QNPAAHAAASFAATFWPYANAETSADSPVCTPDFPSRQIGSPPSVTAIAAATVAAATAWWAAHGLLPLCGPLHTAFACPPASATTVPSMIIDESPQKTERGEIKPQNPPLQDQIPDPEHSEAQHSAPKSPAVSSSKSEDRGDANLDTSPKATNHEMNQAISENPDSNKMKGRKPVDRSSCGSNTTSSSEETELLEKDEKEKEEPKTPDANVLDTELSNRRSRSISNLTDSWKEVSEEV

SEQ ID NO: 72541 - protein, 556 aa, Glycine max
  Clone ID: 700737174_FLI.pep
QVQSLIFLPSCFEEAMGGDATAAAESATAESNAANGVNINIRCSNGSKFSVQIGLDSTIRSFKDAVARNCDISADQQRLIYKGRILKDDQTLQSYGLEADHTVHLVRGFAPSNTTGGTNSVGGGNTTTANTRGAGANEGGGLGGPGFGASLFPGLGGNNGMGGGGLNGLFGAGFPDLEQMQQPFLSNPNLMRDIMNTPAMQNLINNPDIVRNLIMNNPQMQELMDRNPELAHILNDPSTLRQTLEATRNPEIMREMMRNTDRAMSNIESSPEGFNMLRRMYENVQEPFLNATTMAGNTGNDAAAVRNQSTNPSTTNSEATSPVPNTNPLPNPWSSTGTGGGQNNTRRSTTTGGEARQSTPTGLGGLGLPDLEGMLGGTGMPDAAMLTQLMQNPAISQMMQSILSNPQTMNQILGVNNEQRGMPDLNSLREVMQNPEFLRLFSSPETLQQLLSFQQALLSQLGQQQSTQEPGQTGGGTGPMNNLGLEMLSSMFGGLGAGSLAVPNRSNEPPEQLYATQLSQLQEMGFFDTQENIRALIATSGNVHAAVERLLGNSGQ

SEQ ID NO: 72542 - protein, 106 aa, Zea mays
  Clone ID: 701182446_FLI.pep
LITSRSACSGTCALCRATCTRPTGSPPSCRRSRSCSCSCRRRRTGGSATCSASPPPPSSSPSLRRRAASAGRRARTRPCGGRSTPSLDDAQLHSTYSGEYTWPLGS

SEQ ID NO: 72543 - protein, 188 aa, Zea mays
  Clone ID: 701182766_FLI.pep
PPLFSPRPSPLSLRHAGARRCGAPAPATHEGTMDTVAPRLSRSSTRYGPISSSAASFSGPVRKWRKAWVPLTGTGTGTAGSGGGSSRGDNKVVLFRWTPVNGCSGGGGGTDGGMELAAAGASTCRRRYVPAAGEAQSTTKKGTSSELNLNLELEDPDDDTDADMSTDEPRDVEDNSARLESRLKRKAF

SEQ ID NO: 72544 - protein, 214 aa, Zea mays
  Clone ID: UC-ZMFLB73207A02_FLI.pep
GVTSQSGESGSDSSSEGSEGNSHNDSHHKESGQEHDGDVRSSRNGVSRLQSEGKLNQAMAILPIPSSGPATDPTTNLNIGMDYWANTASSAPAIHGKATSTTVPGAVVPAEQWTQDEHELKKQRRKQSNRESARRSRLRKQAECEELAQRADVLKQENASLRDEVNRIRKEYEELLSRNNSLKEKLEGKQHKTDEAGLNNKLQHSGDDSQKKGN

SEQ ID NO: 72545 - protein, 250 aa, Zea mays
  Clone ID: UC-ZMROB73039C03_FLI.pep
SQLDRHLSSWIGSPLGAGLGEALPLDKPQQELHHLGGLLQRVGGAGVLGVLGHEDAHALPALAEHLEGVLVGAVVADVHGQHVGAVGVPEGLEEELQGLALVPLDGGADLEHHPALRQLQLRVVLEHRLHHIRQRDPALLIDASEVDRHTELVVLHLGSRYALGLFHQRIVHLLYHGQELAGRLKENAASFGLGVPGPFGGALDVHAVAAGVVQLCQLHEFEHLVAAPPAHDRRREVLGDAPHRPPHLAG

SEQ ID NO: 72546 - protein, 196 aa, Zea mays subsp. mexicana
  Clone ID: UC-ZMROTEOSINTE076H06_FLI.pep
AEGKIKYIGLSEASASTIRRAHAVHPISAVQLEWSLWSRDVEADIIPTCRELGIGIVAYSPLGRGFLSSGPTLVDKLSDQDFRKELPRFQPENLEKNAVIFDRVNAMAARKGCTPSQLALAWVHHQGADVCPIPGTTKVENFNSNVAALSVELTPQDMAELESYASAGVQGDRYHDFLNTWKDSETPPLSSWKADE

SEQ ID NO: 72547 - protein, 874 aa, Zea mays
  Clone ID: UC-ZMFLB73235D08_FLI.pep
DKNTGTMVSKSYSNLLDMTPGDGFDFRRPFKSLPRVVTSPSIISDHDWDSISDGDSVGSAFSIERKIIVANFLPLNCTRDETGELSFSLDHDSLLMQLKDGFSNETDAVYVGSLKVHVDPREQDQVAQKLLREYRCIPTFLPSDLQQQFYHGFCKQQLWPLFHYMLPICLDKGELFDRTLFQAYVRANKLFADKVMEAINTDDDYVWVHDYHLMLLPTFLRKRLHRIKIGFFLHSPFPSSEIYRTLPVRDEILKSLLNADLIGFQTFDYARHFLSCCSRLLGLHYESKRGYIGIEYFGRTVSLKILSVGVHVGRLESVLKLPATVSKVEEIEQRYKGKILMLGVDDMDIFKGISLKLLALELLLDRNPKLREKVVLVQIINPARSTGKDVQEAITEAVSVAERVNTKYGSSSYKPVVLIDNRIPFYEKVAFYAASDCCIVNAVRDGMNLVPYEYTVCRQGNEEIDRVRGLDKDTHHTSTLIVSEFVGCSPSLSGAFRVNPWSVDDVADALCRATDLSESEKRLRHEKHYRYVSTHDVAYWAHSFAQDLERACRDHYSRRCWAIGFGLNFRVIALSPGFRKLSSEHFVSSYNRASRRAIFLDYDGTLVPQSSINKAPSEEVISILNTLCNDPKNVVFIVSGRGRDSLDEWFSPCEKLRLAAEHGYFIRWSKEAAWESSYSSPRQEWKHIAEPVMQVYTETTDGSSVESKESALVWHYLDADHDFGSFQAKELKDHLERVLSNEPVVVKCGHYIVEVKPQGVSKGRAVDKLIQALANNNGKAQDFLMCVGNDRSDEDMFECINGMASNDVSSTTVPEVFACSVGQKPSKAKYYVDDTSEVIRLLRDATRFSSSQRREDVNASRGRVTFRDALDYVD

SEQ ID NO: 72548 - protein, 874 aa, Zea mays; identical to SEQ ID NO: 72547
  Clone ID: UC-ZMFLB73278D06_FLI.pep

SEQ ID NO: 72549 - protein, 538 aa, Zea mays; identical to SEQ ID NO: 72268
  Clone ID: LIB3068-027-G4_FLI.pep

SEQ ID NO: 72550 - protein, 457 aa, Glycine max
  Clone ID: 700874312_FLI.pep
REIGLISHLGPVNCDWNRVFPASGLGSEVVRMMSVTGKSIDFAGKNLVSCGCSSNASSFDRYTVRNYAKLNSNNSKGCGRDHGARKLVCCKKRSTHCRVSSMKTAQPTVNGGTHAFEGLTTGLDLKGYSEDPISPARLFEVVADDLLTLNKNLQSIVGAENPVLMSAAEQIFSAGGKRMRPALVFLVSRATAELLGLKELTAKHRRLAEIIEMIHTASLIHDDVLDESDLRRGKKTVHQMFGTRVAVLAGDFMFAQSSWYLANLENIQVIKLISQVIKDFASGEIKQASSLFDCDVQLDEYLIKSYYKTASLIAASTKGAAIFSGADSSVTEKMYEYGRNLGLSFQVVDDILDFTQSAEQLGKPAGSDLAKGNLTAPVIFALEKEPKLRDIIESEFSEVGSLEEAINLVKSCGGIERAQELAKEKADLAIQSLQCLPQSVFRLALEDMVAYNLQRIA

SEQ ID NO: 72551 - protein, 95 aa, Glycine max
  Clone ID: 700873428_FLI.pep
PNLRFDLLKELHALSLKKGIFLVLHGASGLSKELVKTCIHLGVRKFNVNTEVRKAYMDSLVTPKNDLVHVMASAKEAMKVVVAEKMHLFGSAGRA

SEQ ID NO: 72552 - protein, 325 aa, Zea mays; identical to SEQ ID NO: 72313
  Clone ID: UC-ZMFLMO17321E12_FLI.pep

SEQ ID NO: 72553 - protein, 285 aa, Zea mays
  Clone ID: UC-ZMFLB73230C10_FLI.pep
GQENIPIPATNLVDDPPVPPSGFKYLKSLQIPKDIKIPSSIIGCDCEGGCASNKKCLCAQRNGSDLPYVSYKNIGRLVEPKAVVFECGANCSCNHDCVNRTSQQGLQYRLEVFKTASKGWGVRTWDTILPGAPICEYTGVLRRTEDLDGSQNNYCFDIDCLQTMKGLDGREKRAGSEMHLPNLHPENDSDAQPAPEYCIDAHSIGNFARFINHSCQPNLFVQCVLSSHNDVKLAKVMLFAADTILPLQELSYDYGYRLDSVVGPDGKIVKLACHCGAPDCRKRLY

SEQ ID NO: 72554 - protein, 218 aa, Zea mays
  Clone ID: UC-ZMFLB73119C08_FLI.pep
KMKYPQVQKLLYVVLLTARKLRHYFDDHKVIVGFPIGDILHNKEAIGRIAKWACELGAHDIEFRPRTAIKTQALVDFVSECTEHQVLDNLETTEVWRMYFDDSLKLQGAGARILFIAPGGEQLKYALQLLFPASNNAAEYEALIHGLNIAVSLSIKKLMVYGDSLVVISQINKDCDCSTDSMSKYRAAVRKSEYKFEGLEFHHVERDRNATADALSKL

SEQ ID NO: 72555 - protein, 148 aa, Zea mays
  Clone ID: LIB3060-017-C5_FLI.pep
GGVTEFDLLDHLFHQVAKFLEGLQYYLSKNCLNLVFQHLNLSPLMKQQLVGWNYEPMKKQARSCQSSYGWKMNLDDSLGANKSLYLLPVTIKELQGLEELVVLLLRPALPGLGDCVRLPHLLAHFLPRPGRVGLGLRRRRAGGDHREA

SEQ ID NO: 72556 - protein, 541 aa, Zea mays
  Clone ID: UC-ZMFLMO17152H06_FLI.pep
KRTTKVEIQRLRQKKEKKNTTNSTRLHLGNERKKRGGCALLVRGSNKESGSTTDGFVPYEWKRTIFSWLIDLNVLSVNTKLNCLDESHSKVLLEGFVTRDGINCSCCSEVISVPEFVTHAGSEVNKPYRNILVDGLDIDLLHCLINAWNMQSDAERQDFFPVSIEGDDPNDDTCGICGDGGNLICCDGCPSTFHMSCLGLEALPTDYWCCSNCSCKFCHEHSSDDAEDTADVDSSLHTCSQCEEQYHGACSPDIDSIATNLSSQTGNLFCQQSCRLLFEELQNLLAVKKDLEPEYSCRVVQRIHEEVPEEVLALDKRVECNSKIAVALSLMDECFLPIVDQRTGINLIRNVVYNCGSNFARLDFRGFYIIILERGDEIIAAASVRIHGTKLAEMPFIGTRNMYRRQGMCRRLVDGIEMILSSLNVEKLIIPAITELVDTWTSKFGFSPLDDSEKQEVKSVSMLVFPGTGLLQKPLLKASPSEDQCSQGDKTEKPSDVVNEDSLCSGASADPLGSVVEEHGDTSKDADGTCNGDVSQRSPHS

SEQ ID NO: 72557 - protein, 374 aa, Zea mays
  Clone ID: 700099246_FLI.pep
IECWCWQLGLPEKNFFNDNFELVLSEPSDANTNSTTLLSDETDDRPKGNTNQETGTSKQLEYESNPSVAEPDQREKMEGVPGSALDASKKSSPRRAFSRPIKTNLRVAESSAFLAYVKPSTPATSSFDSELQRGGSRLDSLDNQGNCSSATDRSDTGTDVNIRSKEAFEMPAQYPMVWFSSSNMHMERSSEGHNDTSGTPPAYHFPFYYPGMVEHNMALSSAQDFQANINNAQAHTPPAMLPQYNVYPQCHGLPVIPSFQFNPSGMSTHSSHLPTQNVWSSASSTPPVPEETCSRSERRAAALAKFRLKRKERCFDKKVRYVNRKKLAETRPRVRGQFVRQPTNTDVISIGDDISEDEDDDPSSREVDMVSSPE

SEQ ID NO: 72558 - protein, 240 aa, Zea mays
  Clone ID: UC-ZMFLB73025G10_FLI.pep
GQLGGCVWPPRSYTCTFCRREFRSAQALGGHMNVHRRDRARLRQCAPPDHDQEPIAAPLPAPELADHQQQLLQLHGSPMTKAAVLFSGRPAAACCTHQQTYCNNNREGEGEDSPARYISTTTTIIKDSKSKVLISIPAATTATGSKKAATTIAIIGEEEEEEEEEEEIMVTGRRTKRRRLVHQPFYDLRRLPPASSSPNKGGVEDDDAKVPKLSSPSSLSHHLAGRQEEVDLELRLGTSC

SEQ ID NO: 72559 - protein, 616 aa, Zea mays
  Clone ID: LIB3632-041-F10_FLI.pep
RLGALEENSSPWALGWSGRGRRKLPMEPPTGFWASLLSFLKFLPYFCGLLVLGLIKGVLLCPWACLIMAIGISALVLGLWPMHLIWTYYCIVRTKLVGPVVKLLLLIAATAVLIIWLIIGIPGSIFAGLVYGFLAPIMATFDAVGEGKEKPFVHCFVDGTWSTITGSCTVVRDVKDLLFHSYFSLMDDLRLQKPPDGEPYEIRLLDIPGALIAAAFGLLLDGIMFTLIAFYKCPVMLFKGWKRLIQDMIGREGPFLETACVPFAGLAILLWPFAVVGAVLASILSSAPLGAYAAVVAYQESSLILGIAYVFSSVSIFDEYTNDVLDMAPGSCFPRFKYRKGKDESSHGHSVPLSRPASFNREKQEGKRPPSRVTSFKNSIDDFNPFKLLDHLFAECRNQGEDLVNRGVITMKDIEETKSGKVGSGVLNVGLPAYVILNALLRSAKADSVGLILSDGSEITSDNRPKNTIFDWFFDPLMVIKEQIKAENLTDEEEEYLKMRVLLAGDPSRLKGSLPHVPSLTERKKADIDAFARRLQGITKSISRYPTSKRRFDVLVKALLSELERTMGQSGNGSQSQAQRLRNSVARMLSQKSMGKTANIRDEDPEAQMTRLSRTP

SEQ ID NO: 72560 - protein, 288 aa, Zea mays
  Clone ID: LIB3593-003-A1_FLI.pep
LLLALARLVCCKKVTVTAGMEGKEEDVRLGANKFSERQPIGTAAQGTDDKDYKEPPPAPLFEPGELKSWSFYRAGIAEFVATFLFLYISILTVMGVSKSTSKCATVGIQGIAWSFGGMIFALVYCTAGISGGHINPAVTFGLFLARKLSLTRAVFYIIMQCLGAICGAGVVKGFQQGLYMGNGGGANVVAPGYTKGDGLGAEIVGTFILVYTVFSATDAKRNARDSHVPILAPLPIGFAVFLVHLATIPITGTGINPARSLGAAVIYNQHHAWADHVIIRAIPFKSRS

SEQ ID NO: 72561 - protein, 152 aa, Zea mays
  Clone ID: LIB3150-041-H6_FLI.pep
TNRRRPSRGALHSSLTLPLPTHAASLGFSGGGEMVQRLTYRKRHSYATKSNQTRVVKTPGGKLVYQYTKKRASGPKCPVTGKKIQGIPHLRPAEYKRSRLPRSRRTVNRPYGGVLSGIAVRERIIRAFLVEEQKIVKKVLKIQKTKDKTAAK

SEQ ID NO: 72562 - protein, 451 aa, Zea mays
  Clone ID: UC-ZMFLMO17130H03_FLI.pep
FSEKNNLETKVEETLQDSGKKDFKNEIHVMAAALSNELGMMENQLSRSKDAASEALALREQAESLRSLVAKKIEEHKKILDKYNSQVIEIKSLKALVEELEQEKQELEFIADMYVKESSESRTIADIEESETRARNQAEYLRSNLEEHSLELRVKAANEAEAACQQRLSFAEVELEELRTKVDASERDVVELKEAIRIKEAEGDAYISDIETVGQAYEDMQTQNQHLLQQLTDRDDFNIKLVSDSVKMKQACSSLLSDKLMLEKQLQQVNTSLESSKLKIARGEEQMKTCVAQAIKTSAENRHLTISLERIALEVSNTDKELKWLRSSVGSSEKEYEQTQQKISELRALLEHERSERRRLEEQYEEVKNEVMELTSETEETTVRKLEDEIKECKGILKCGVCFDRPKEVVITKCFHLFCSLCIQRNLEIRHRKCPGCGTPFGQNDVREVKI

SEQ ID NO: 72563 - protein, 801 aa, Zea mays
  Clone ID: UC-ZMFLB73116H03_FLI.pep
VNKSNHLFMVKGIEAGQSSNILRQKEIENGSRQIKWEQPTLSFGDMGRPFLTRSQSALESPQCTRRDDNKDPTTDSTSESFSEACLSMSLGIANNVNRMEATSTAERPVLLSTTAIAEGRELATTLSPFQHAQRARHFLTRPPRIGEGAAFDPTRDMFPHLRVARPPADGRGRNQLLPRYWPRITDQELQQISGDSNSTIVPLFEKVLSASDAGRIGRLVLPKACAEAYFPPISQPEGRPLTIQDARGKEWHFQFRFWPNNNSRMYVLEGVTPCIQSLQLQAGDTVTFSRIDPGGKLVMGFRKATNTVSLPDSQISAIANGSLLSETLFSTANENIGVVSGYPGFLHSIKGAADLHPNSLYDHHMNLVDGDVSWNKADKFGSRPDEGSLQFLQKRSHNIGSKSRRFLIDAEDAMELKLTWEEAQELLRPAPTAKPTVVMIEDYEFEEYDEPPVFAKRSIFTIRATGEQDQWIQCDDCSKWRRLPLNVIVAPKWTCTDNSWDSKCCSCSAPEELTPRELQSVLQQYEEMRRRKGSYGLKLNVAEMDASSLDAFATAAVFGEVGNQGSASVATTTKHPRHRPGCTCIVCIQPPSGKGPKHSPACTCNVCMTVRRRFKTLMMRKKQRQSEREEAEAGKKIAWVNRDEPEGSSLSRSPQTLDSTRDNSDVTATMLDKVSDVNKQGHIDVDLNLHPAAPAVQAAQQQPRPVSMMGLLEVAGRPLDNYMKQNGLTSLVGEQGGGSSSTATVPPPALVESEERTSNEGLVPSASAEREPNAMAVDEAGENQQDKAAADDDDAVAAAAT

SEQ ID NO: 72564 - protein, 129 aa, Glycine max
  Clone ID: LIB3106-070-A1_FLI.pep
SEEAQISVSPSVSTVWVAANEKKCHSFFPSGSCLEKDSFTMIALTAANRLGSRKRWICSDILQHLSALSNRVMYLIPIHTEVISNLLMVAVAASEEKNFKSIMSSLGYRMLLHSRQNFMALILPTMRRE

SEQ ID NO: 72565 - protein, 146 aa, Glycine max
  Clone ID: LIB3106-074-C2_FLI.pep
EIVMAPKAEKKPAEEKKSTVGDKAPAEKKPKAGKKLPKEGGAGGEGKKKKRNKKSVETYKIYIFKVLKQVHPDIGISSKAMGIMNSFINDIFEKLAQESSRLARYNKKPTITSREIQTAVRLVLPGELAKHAVSEGTKAVTKFTSS

SEQ ID NO: 72566 - protein, 153 aa, Glycine max
  Clone ID: LIB3106-096-A12_FLI.pep
IQDSASAFWKQRPKYFEMARTKQTARKSTGGKAPRKQLATKAARKSAPTTGGVKKPHRYRPGTVALREIRKYQKSTELLIRKLPFQRLVREIAQDFKTDLRFQSHAVLALQEAAEAYLVGLFEDTNLCAIHAKRVTIMPKDIQLARRIRGERA

SEQ ID NO: 72567 - protein, 254 aa, Zea mays
  Clone ID: LIB3159-002-H1_FLI.pep
ATESNRRGKGRLLYIPSRLQSASIHPAVSGQPRGRVRVDLSVEGMKITALLVLKPSTSGAGSSSSGGQSGPEAVVLANATDVSHFGYFQRSAAREFIVFVARTVAQRTQPGQRQSVQHEEYKVHSHNRNGLCAVAFMDDHYPVRSAFSLLNQVLDEYQKAFGESWKSATADGTQQWAFLTDALARFQDPAEADKLMKIQRDLDETKIILHKTIDSVLARGERLDSLVEKSSDLSAASQMFYKQAKKTNQCCTIL

SEQ ID NO: 72568 - protein, 399 aa, Arabidopsis thaliana
  Clone ID: LIB23-061-D6_FLI.pep
KYQWALQECKFMCADVTSPDLKITDGSLDLIFSNWLLMYLSDKEVELLAERMVGWIKVGGYIFFRESCFHQSGDSKRKSNPTHYREPRFYSKVFQECQTRDAAGNSFELSMIGCKCIGAYVKNKKNQNQICWIWQKVSSENDRGFQRFLDNVQYKSSGILRYERVFGQGFVSTGGLETTKEFVEKMNLKPGQKVLDVGCGIGGGDFYMAEKFDVHVVGIDLSVNMISFALERAIGLSCSVEFEVADCTTKHYPDNSFDVIYSRDTILHIQDKPALFRTFFKWLKPGGKVLISDYCRSPKTPSAEFSEYIKQRGYDLHDVQAYGQMLKDAGFTDVIAEDRTDQFMQVLKRELDRVEKEKEKFISDFSKEDYDDIVGGWKSKLERCASDEQKWGLFIANKN

SEQ ID NO: 72569 - protein, 65 aa, Zea mays
  Clone ID: 700160263_FLI.pep
LNPAWVCEDCTISSTVPTFLTLRTWVPTFLTLFQKKNKKYKNEKLDTHNITCNTIYHIQYRFQTH

SEQ ID NO: 72570 - protein, 212 aa, Arabidopsis thaliana
  Clone ID: LIB23-010-E7_FLI.pep
DYNNMEGIIVRRVIPSDNSCLFNAIGYVMDKDKNKAPELRQVIAAAVASNKEKYNEAFLGKLNEEYCAWILNPDKWGGAIELSILADYYGREIAAYDIQTSRCDLYGQTRNYDERVMLIYDGLHYDALALSPFEGAEEDFDMTIYPVGKDRSIGSIEGLALNLVKDQQRKRSYTDTANFTLRCGVCQIGVIGQKEAVEHAQATGHVNFQEYK

SEQ ID NO: 72571 - protein, 90 aa, Arabidopsis thaliana
  Clone ID: LIB23-021-F3_FLI.pep
SARTTNPLKKLTFPVWNVESNLICLFISTPNHRQFHCLKPPDWYLWLLRLEKKSSEISGACCCCCCCCCCCVLYRPVLPSPDPAPMDQPE

SEQ ID NO: 72572 - protein, 611 aa, Arabidopsis thaliana
  Clone ID: LIB23-027-F3_FLI.pep
ADQKTLEFLPLLCKFDLVVSTKRRREKEGFRLCVLFQRVYFSLTPIEMVDSSRDSCFKAGKFSAPGFRFHPTDEELVVYYLKRKICCKKLRVNAIGVVDVYKVDPSELPGLSMLKTGDRQWFFFTPRNRKYPNAARSSRGTATGYWKATGKDRVIEYNSRSVGLKKTLVFYRGRAPNGERTDWVMHEYTMDEEELGRCKNAKEYYALYKLYKKSGAGPKNGEQYGAPFQEEEWVDSDSEDADSVAVPDYPVVRYENGPCVDDTKFCNPVKLQLEDIEKLLNEIPDAPGVNQRQFDEFVGVPQGNSAEVIQSTLLNNSSGEYIDPRTNGMFLPNGQLYNRDSSFQSHLNSFEATSGMAPLLDNEKEEYIEMNDLLIPELGASSTEKSTEFLNHGEFGDVNEYDQLFNDISVFQGTSTDLSCLSNFTNNTSGQRQQLLYEQFQYQTPENQLNNYMHPSTTLNQFTDNMWFKDDQAALYVQPPQSSSGAFTSQSTGVMPESMNPTMSVNPQYKEGQNGGGTRSQFSSALWELLESIPSTPASACEGPLNQTFVRMSSFSRIRFNGTSVTSRKVTVAKKRISNRGFLLLSIMGALCAIFWVFKATVGVMGRPLLS

SEQ ID NO: 72573 - protein, 430 aa, Arabidopsis thaliana
  Clone ID: LIB23-028-H4_FLI.pep
FRILVMGLGNKGNKFNFGDNDLADEASGADGDEGDGFGSVACSICLETVVKNGDRAWANLQCDHQFHLDCIGSAFNAKGVMQCPNCRKVEKGQWLYANGCRSYPEFNVEDWVHEEDIYDIGAYSEMSFGVHWCPFGSSARLPSFEDGEFSPSSYHDLLGQQGYYTEPAAPTAGHPCPYVTYFGPVHSPSSSSGGAAGVSDSSSFSSHWNTGSSVSGEVPTPYGFPVDPHYHGWDYHPPPPPPPQHFSASGAHVGSPTQPTPPPAAARTSRANGSDMIRPRPPHFTRPFHGHSSSGRAGSSVASVPRTPPFPGSNARTRDRMQALQAYYQQSSAQSHQPDSPIVSRGPVFPSGRRPARGIASGMGSTSSSSDQAGGSGFIRFNIWERDPYMQSQQAYSVNQMDREPNIWTSSFNEGSGSFHQRHGGGGGSS

SEQ ID NO: 72574 - protein, 147 aa, Arabidopsis thaliana; identical to SEQ ID NO: 37213
  Clone ID: LIB23-031-E2_FLI.pep

SEQ ID NO: 72575 - protein, 220 aa, Arabidopsis thaliana
  Clone ID: LIB23-032-G7_FLI.pep
SINTYVHTYMSINPTMSRTGESSSGSSSDKTIKLFGFELISGSRTPEITTAESVSSSTNTTSLTVMKRHECQYCGKEFANSQALGGHQNAHKKERLKKKRLQLQARRASIGYYLTNHQQPITTSFQRQYKTPSYCAFSSMHVNNDQMGVYNEDWSSRSSQINFGNNDTCQDLNEQSGEMGKLYGVRPNMIQFQRDLSSRSDQMRSINSLDLHLGFAGDAA

SEQ ID NO: 72576 - protein, 256 aa, Arabidopsis thaliana
  Clone ID: LIB23-048-B10_FLI.pep
HYLLRQMGKEILHTESKKTDKLVDNIQSSMIATKEIEITRSKSRRKNNKEKRVVCVVDRGSRSSDLWVWRKYGQKPIKSSPYPRSYYRCASSKGCFARKQVERSRTDPNVSVITYISEHNHPFPTLRNTLAGSTRSSSSKCSDVTTSASSTVSQDKEGPDKSHLPSSPASPPYAAMVVKEEDMEQWDNMEFDVDVEEDTFIPELFPEDTFADMDKLEENSQTMFLSRRSSGGNMEAQGKNSSDDREVNLPSKILNR

SEQ ID NO: 72577 - protein, 496 aa, Arabidopsis thaliana
  Clone ID: LIB23-048-B1_FLI.pep
LSFSFLLPLSLTKTLVSFTRRRFSRHRNLQIRLSLHYDPCPVTSTPVIPPIRRHLAFASTKPPFHPSDDYHRFNPSSLSNNNDRSFVHGCGVVDREEDAVVVRSPSRKRKATMDMVVAPSNNGFTSSGFTNIPSSPCQTPRKGGRVNIKSKAKGNKSTPQTPISTNAGSPITLTPSGSCRYDSSLGLLTKKFVNLIKQAKDGMLDLNKAAETLEVQKRRIYDITNVLEGIDLIEKPFKNRILWKGVDACPGDEDADVSVLQAEIENLALEEQALDNQIRQTEERLRDLSENEKNQKWLFVTEEDIKSLPGFQNQTLIAVKAPHGTTLEVPDPDEAADHPQRRYRIILRSTMGPIDVYLVSEFEGKFEDTNGSGAAPPACLPIASSSGSTGHHDIEALTVDNPETAIVSHDHPHPQPGDTSDLNYLQEQVGGMLKITPSDVENDESDYWLLSNAEISMTDIWKTDSGIDWDYGIADVSTPPPGMGEIAPTAVDSTPR

SEQ ID NO: 72578 - protein, 169 aa, Arabidopsis thaliana
  Clone ID: LIB23-068-H9_FLI.pep
FEFCSSSMKEVLERHNLQSKNLEKLDQPSLELQLVENSDHARMSKEIADKSHRLRQMRGEELQGLDIEELQQLEKALETGLTRVIETKSDKIMSEISELQKKGMQLMDENKRLRQQGTQLTEENERLGMQICNNVHAHGGAESENAAVYEEGQSSESITNAGNSTGSAC

SEQ ID NO: 72579 - protein, 126 aa, Zea mays
  Clone ID: LIB3059-009-D5_FLI.pep
RLRGGMQIFVKTLTGKTITLEVESSDTIDNVKAKIQDKEGILQLLASEDQTLLVWGDALFVLDLCWQAAGGWPHPSRLQHPEGEHSPPGAPPPWWSVSHGSFKLLLYLGICVVWCPLVYLYMDVVV

SEQ ID NO: 72580 - protein, 149 aa, Zea mays
  Clone ID: LIB3059-021-A5_FLI.pep
MQSIKGPQRAPSNQVGNPIERSNPIQARTRSRHPPTLGVREARRLGCARACIAYACFLARRRVPHCLPPAPVSMSLLLVLLSSPWLSCSSMMGFILWSVMAMQMSLGKSFRSTNACTSVVTNSAVTVSTAITDSATQSALVKVLSTSVE

SEQ ID NO: 72581 - protein, 236 aa, Zea mays
  Clone ID: LIB3059-021-H5_FLI.pep
VDDGETFQWSKVTTTINNLILGRVYCHHHGTMNISGNRRYSCKLTFKEQSFLDRNPRQVQGVVNDADGSKVATLMGKWDESMHYIINNDASKTNSHGSHEGSGATLLWEKNEPPVNPTRYNLSTFAITLNELTPELKEKLPPTDSRLRPDQRHLENGEYEKANAEKLRLETRQRMARKMQESGWKPRWFQRDSEDGTYRYVGGYWEAREQRPWVGCNDIFGNLSSSPKLPPSGSQY

SEQ ID NO: 72582 - protein, 362 aa, Zea mays
  Clone ID: LIB3059-022-H4_FLI.pep
LAHAIANETGVPFYKISAPEVVSGVSGASEENIRGLFQKAYRTAPSIVFIDEIDAIASKRENLQREMERRIVTQLMTCMDQFHQNIGSGSSNLEAESSEKKPGYVIVIGATNRPDAVDQALRRPGRFDREISLGVPDENARKQILKMLTQHLRLEGEFDLFKIARATPGFVGADLKALVDKAGNLAMKRIIDERRARCCIEQDGSSKHDWWRQPWDESEVDELHITMNDFEEAAKMVQPSLRREGFSSVPGVTWDDVGGLDSLRKEFDRCIIRCIKHPEDYEVFGVNMQAGFLLFGPPGCGKTLIAKAVAHEAGANFIHIKGPELLNKYVGESESEVRKIFTRARTNSPCILFFDEVDALTT

SEQ ID NO: 72583 - protein, 139 aa, Zea mays
  Clone ID: LIB189-011-H11_FLI.pep
SCPYRALTLFLVGPFLDGFLTNQNVFAFDYTTQVLFFIMLSCLISVSVNFSTFLVIGKTSPVTYKVLGHLKTCLVLTFGYVLLHDLFSWRNILGILIVVIGMVLYLYFCTRETQQIPAEASPQVVQVSVCWNSRSEWCF

SEQ ID NO: 72584 - protein, 421 aa, Zea mays
  Clone ID: LIB3060-071-C7_FLI.pep
ASNRRMEAAVAAALKSPTAARPSWRPAAPGATSLPFDRRRSFAFGSIKGLGRQQLTSRTRRRSSVVRASWSPSESLPPSSSMAPLRMESPAGQLLSQILHTHPHLLPAAAEQQLELLQTDREAEKNKDKESDAGDKLAPTGVDLVLYRRIAQVKEKERRRTLEEILYALVVEKFVEAGVSLVPALSRSIDSSGRVDQWAETVEGRLQRLHSPEAYEMIENHLALILGQRQSDATIAAISKLRVGQVYAASVMYGYFLKRVDQRFQLEKTMKSLPWGSEEEDGALYQVMTTDSMPSAQSSSSHPEMGSWTAAPDFNAGGPSESIKPCRLRSYVMSFDPDTLQRYATVRSKEAFGIIEKHTEALFGKAEIVVTPGGTVGSSKDEHIRISFAGLRRLVLEAVTFGSFLWDVESFVDSSYHFVTS

SEQ ID NO: 72585 - protein, 149 aa, Arabidopsis thaliana; identical to SEQ ID NO: 56934
  Clone ID: ARABL1-033-F4_FLI.pep

SEQ ID NO: 72586 - protein, 203 aa, Zea mays
  Clone ID: LIB3150-027-H11_FLI.pep
RALSILFSAPRGSPVRPVPHSYPLLTLAAAASPAPRAKMNVEKLKKMAGAVRTGGKGSMRRKKKAVHKTTTTDDKRLQSTLKRIGVNTIPGIEEVNIFKDDVVIQFVNPKVQASIGANTWVVSGTPQTKKLQDLLPSIINQLGPDNLDNLRRLAEQFQKQAPGASGAEAGASAGAAQDDDDDVPELVPGETFEEAAEEKKESS

SEQ ID NO: 72587 - protein, 195 aa, Zea mays
  Clone ID: LIB3607-055-B5_FLI.pep
DPSRTTAPAEEPTDGRSGREAMAAAWGQKALGALPQLVKSLRSDPVSGSARHRRLPSLRRTFSLYDQINLIDSVPEDELRFQSYDDTGFKINNVKYEGSVLIVENKIMTWAPKTFSEITPESLSIFKVVHPIPEIFILGCGRHVQLVSPELRMFIRSTGMKLEAVDSRNAASTYNILNEEGRPVAAAVLPYGVTC

SEQ ID NO: 72588 - protein, 463 aa, Zea mays; identical to SEQ ID NO: 58993
  Clone ID: LIB3060-007-A11_FLI.pep

SEQ ID NO: 72589 - protein, 230 aa, Zea mays
  Clone ID: LIB3591-102-G10_FLI.pep
GFLMQKELDYLVGAVANPKKPFAAIVGGSKVSTKIGVIESLLAKVDILILGGGMIYTFYKAQGYSVGKSLVEEDKLELATSLIEKAKAKGVSLLLPTDIVVADKFAADAESKIVPATAIPDDWMGLDVGPDATKTFDEALDTTKTVIWNGPMGVFEFQKFAAGTEAIAKKLAELTTTKGVTTIIGGGDSVAAVEKAGLADKMSHISTGGGASLELLEGKTLPGVLALDDA

SEQ ID NO: 72590 - protein, 126 aa, Zea mays
  Clone ID: LIB143-021-D7_FLI.pep
NRPRRLLCPKGLGFQRRRLPSPIPRSEAPQTTALPQIQIHPATAASPWGRWRGRTRVHGDAQLRPGLHQGLRALRARLPHARRDRDRPQLPPSHPPASGDLIPILLNSFSYGPFLDTFRKPFVMLP

SEQ ID NO: 72591 - protein, 574 aa, Zea mays
  Clone ID: CC-ZMPO148045E09_FLI.pep
SIGRYVLGWSRATRDMATTTRVAAAATGVLLVLSALATLARAEDPYLFFEWKVTYGTKSLLGVPQKVILINGEFPGPRINCSSNNNIVVNVFNQLDHPLLFTWNGMQHRKNSWMDGMPGTQCPILPNTNFTYKWQPKDQIGSFFYFPSIGMQRAAGGYGAISVVSRLLIPVPFDQPPPENDHVVLIGDWYTKDHEVLARQIDAGKGVGRPAGVLINGKGGKDLEAAPAFTFEAGKTYRLRVCNTGIKASLNFRIQGHYMKLVELEGSHTLQNTYDSLDVHVGHCLSVLVDADQKPGDYYMVASTRFIHDAKSASAVIRYAGSSAPPAPNMTEPPAGWAWSINQARSFRWNLTASAARPNPQGSYHYGQINITRTIKVMVSRGHIDGKLRYGFNGISHRDPETPVKLAEYFNVTDGVFSYNQMGDVPPAVNGPLHVIPNVITAEFRTFIEIVFENPEKSIDSLHVDGYAFFGVGMGPGKWSPEVRKTYNLLDTVSRHTIQVYPRSWTAIMLTFDNAGMWSVHSNIWERYYLGEQFYISVVSPARSLRDEYNMPDNALRCGKVVGLPLPPSYAPAR

SEQ ID NO: 72592 - protein, 224 aa, Zea mays
  Clone ID: CC-ZMPO148065A03_FLI.pep
SVKEGEIKMSLFGLGSKNQKTFRPKKNAPSGNKGVQLKKHIDATLGSGNLRDAVRLPPGEDLNEWLAVNTVDFFNQVNILYGTLMEFCTPATCPTMSAGPKFEYRWADGVQIKKPIEVSAPKYVEYLMDWIEAQLDDESIFPQKLGTPFPQNFKEVVKTIFKRLFRVYAHIYHSHFQKIVSLKEEAHLNTCFKHFTLFTWEFTLIDKAELAPLIDLIESIVSVC

SEQ ID NO: 72593 - protein, 367 aa, Zea mays
  Clone ID: CC-ZMPO14820017E02_FLI.pep
GRHHGGCFLLDGRRAHLPGRRPWLRQPGHLVGVDGADPYHRRAAAAVLRVVELGARLPDLAFLPREHLEHAELLHGLGEDRDEVGGLVRHGLHYGLRLLVHPHQAVDGERHLLLQHQAEVAPVQVVGRGGVHGDGARVLAVARVADRLLVLGVDGRRVGLDEEAPADADAVAAAQHRDHLLDVEALLVELVDELGHRDVRARQVVGVLAVGHERVAPPQGHRVLGPARQLHRVAGAHRDDVRARHHVRALLLQLRLDLLDHVVALHGDVGAGLLLGGLVRHRVDQDGRVAAICEAVVEDEAEEAGGGAGVSFEPLLDDVEDDLLGVGARRLVEIRRELRGGQRRGRRGGEEEEEDEAGVHHAEMERG

SEQ ID NO: 72594 - protein, 384 aa, Glycine max
  Clone ID: LIB3030-012-H10_FLI.pep
KRSERKKRETRMEVTQVLHMNGGSGETSYANNSLVQQKVIFLTKGMREEAISSLYRSMLPRSLAVADLGCSSGPNTFFVISEAIKSVEKLCRELNHQSPEYQIYMNDLPGNDFNNIFKSLDSFKEKLCNEIIEAGHGIGSCFFNGVPGSFYGRIFPTKSLHFVHSSYSLMWLSKVPDGVENNKGNIYMASTSSLNVLKAYYEQYQKDFSLFLKCRAEEIVEGGRMVLTFLGRRSDDRSSKECCYIWELLAMALNDMVSKGIIKEEQMDTFNIPQYTPSPSEVKFEVQKEGSFSITSLEVTVVPWNAYDNGNAFDSECGLSKSLSNGGYNVTKCMRAVAEPLLVSHFGEAIIEEVFSRYQQILTERMSKEKTEFVNVTISMIRRA

SEQ ID NO: 72595 - protein, 253 aa, Zea mays
  Clone ID: LIB3061-071-B3_FLI.pep
AKTLTRDAAPSSSSLSHHRPPLAIFAAGAAAIRSGRGRRGEGGGSVSRFDWSSRPRRSRMVRGKTQMKRIENPASRQVTFSKRRNGLLKKAFELSVLCDAEVALVVFSPRGKLYEFASGSAQKTIERYRTYTKDNVSNKTAHQDIEQVKADAEGLAKKLEALEAYKRKLLGERLEECSFEELHSLEVKLEKSLHCIRGRKTQLLEEQLHKLKEKEMNLRKSNEDLREKVMGAKTFCRRCTAASGMPTTQENRL

SEQ ID NO: 72596 - protein, 471 aa, Zea mays
  Clone ID: LIB3079-033-G8_FLI.pep
AYTTSAPTTTTILILREEIPSSGKRTRQETYPSSILRPSMASSSLALPPISLLLALLLLSAPSPSACASLSFLTASSNGSASTSADPELEDLAPEPTFLEEVIDAVSEKYDWDPDAEVRVWPLDAGAVRVGSVQRYEFRARAGGSAALARFSDEAVEWRLPSAPAVEEVDGPDGVDVVPAEGAFGFDTGVRDVELVGPVELKLAGNQDGSLVELQLPSGNATYTRLKRIFVADGIALKVIGAQKVSVTHPHSIGLLSNGSLLASNNDLSQIWPLSYSTCAPLLQVGIVGSVVIVVHQTSVSGGHVKTFLRSHDTIELLSDKYKVHISNRLISEFLFSSISPRLIKLEKILKTWFSKRNQENSSVHFIEAKVTSIPLVKFRLEFERDVTEDDPIWEDVPEWKTRPMVQRVPVDIIARVEDDDRLKAISVKKVRRQFPVVDTTTWGSLTSNISFTKFLSFILPPEPLSLDVKW

SEQ ID NO: 72597 - protein, 195 aa, Zea mays
  Clone ID: LIB3079-059-G3_FLI.pep
SLFSHSHFVIPEIFKYLNKVVVLDDDVVVQRDLSFLWHIDMGDKVNGAAEFCDLKLGEMKNVLGKTAYDPESCVWMSGVNLINLDKWREHNVTENYLLLMQKFEFKDELSLRAAAFPLSLLSFQHLIYPLDEKLTLAGLGYDYGIDEEVARRSASLHYNGNMKPWLELGIPDYKKYWKRFLDRGDRFMDECNVNP

SEQ ID NO: 72598 - protein, 75 aa, Zea mays
  Clone ID: LIB3079-049-B12_FLI.pep
ITLISITFAFLSFTTRSISSFLTCRDDQKPIYENKNVYINASNVTMNTSTKFFEIEKRTRQSISHNISRCGKLTL

SEQ ID NO: 72599 - protein, 606 aa, Zea mays; identical to SEQ ID NO: 59871
  Clone ID: LIB3079-008-H3_FLI.pep

SEQ ID NO: 72600 - protein, 200 aa, Zea mays
  Clone ID: LIB3115-021-H3_FLI.pep
RIHEGGQVGQICYISSSAEWPSPVDGCGASGGLGRVVELRLGQPRRRHGHERRGLLHDDRELLVQLQPRAGRQLPVERLQQHGQRVGRHPLGHGDASADPAPGPEREVLHLAAREVPPAPFAGAVQEPLRDEVPRVLPHGGVPHDRPHVDEHAAPRRDAVAAHRGVGAGAVRHHQRQRRVQPQRLLDHRVQVGKLRQVRL

SEQ ID NO: 72601 - protein, 556 aa, Zea mays
  Clone ID: UC-ZMROB73078A09_FLI.pep
NATHQALRVAMERSAESWWVLPMTLIPAISGEQHGNMATVATSFAYLAIFACLAWVGASLLYWAHPGGPAWGKYWRARGKKPSAAIPGPKGLPVVGSLGLMSGLAHRSLADEASRRPGAKRLMALSLGPVRAVVTSHPDVAKEILDSPAFAARPLNHAAYGLMFHRSIGFAEHGPYWRALRRVAAGHLFGPRQVEAFAPYRAAVAEGIVAALLRAGSGGAVVQVRGLLRRASLYYIMRFVFGKEYDVSRVVPPSGGEEVEELLEMVHEGYELLGMENLCDYFPGLAALDPQGVGARCAELMPRVNRFVHGVIQEHRAKAVAGGDARDFVDILLSLQESEGLADADIASVLWEMIFRGTDAMAVLMEWTLARLVLHRDVQAKAHRELDKVVGADSQTTESAAPYLQALLKEALRMHPPGPLLSWRHRAISDTYVDGHLVPAGTTAMVNQWAISRDPEVWDAPLEFRPERFLPGGEGQDVSVLGADGRLVPFGSGRRSCPGKSLAMTTVTSWMATLLHEFEWLPASDDTGDVDLSEVLRLSCEMAVPLEVRVRPRSSV

SEQ ID NO: 72602 - protein, 632 aa, Zea mays
  Clone ID: UC-ZMROB73005E01_FLI.pep
LLVAPCLVSFTHLPPRPAPMADSPNPSSGDLPAGAGCSPEKPVLADRRVSALAGAGARYKAMSPARLPISREPCLTIPTGFSPGALLESPVLLNNFKVEPSPTTGTLSMAANMNKSTHPDILPSPRDNSADSGQEDGGSREFEFKPHLNSQSSATAVNNQNHHDIPMQNHGSNHASPSSNLMTENKPLCSRESSHTANVSSAPNQPVSIVCPSDNMPAEVGTSEMHLINSSENAAQETQTENVAEKSAEDGYNWRKYGQKHVKGSENPRSYYKCTHPNCEVKKLLERSLDGQITEVVYKGHHNHPKPQPNRRLAAGAVPSSQAEERYDGVAPIEDKPSNIYSNLCNQAHSAGMVDNVPGPASDDDVDAGGGRPYPGDDSNDDDDLDSKRRKMESAGIDAALMGKPNREPRVVVQTVSEVDILDDGYRWRKYGQKVVKGNPNPRSYYKCTHTGCPVRKHVERASHDPKSVITTYEGKHNHEVPASRNASHEMSAAPMKPVVHPINSSMPGFGGMMRACDARAFNNQYSQAAESDTISLDLGVGISPNHSDATNQMQPSVPEPMQYQMRHMAPVYGSMGLPGMPVPAIPGNVVASSIYGSREEKGNEGFTFKAAPLDRSANLCYSSAGNLVMGP

SEQ ID NO: 72603 - protein, 182 aa, Zea mays subsp. mexicana
  Clone ID: UC-ZMFLTEOSINTE080F02_FLI.pep
RLLCVRPAVIPRGPWPWPWPCAKKQTILDSTGGEGDAPGEGGRDAATMSPIWVFGYGSLIWNPGFAYDDRVVGFVRDYRRVFYQGSTDHRGTPQFPGRTVTLEHQPGATCVGSFSCSPSYSVNVTAKDRLITRTRKPNELVNSWLMTCHSHYVMLSCSTPVLLIVLDSLVILLAVHAIDFAS

SEQ ID NO: 72604 - protein, 307 aa, Zea mays subsp. mexicana
  Clone ID: UC-ZMFLTEOSINTE083B10_FLI.pep
LDEHGKRRSKDDVVVLLPSSSQQICRSPHGDAPLEREILGELFLCEKPGVGHLALDLPLLVALDLLEPEKVLALEFVELPLDVADGVLDPRLHDILERVDAAVGGLDGLVEREEGGLERGELDEHLDGLDVRGAAGGDLLPAAGEARKARRRVGGPPGCRGGVDEVSELGELDPGDILLVGSNADGGGADGLEDDVTDAVAGDILGLGEGEGGGAHRLAHGLLGGYDLLEDGAELDRERVGLLLQQRVAAGGADEPRLHDAEHRHRRHDVEPLVLPRHRCAARRRLDRRESGEGRKGSGSRACVECR

SEQ ID NO: 72605 - protein, 168 aa, Zea mays subsp. mexicana
  Clone ID: UC-ZMFLTEOSINTE102C10_FLI.pep
SLPSLYITQEEFQLALFKNQRKENLFANRIFDLFDVKKRGAIDFGDFVRALNVFHPNIPMDEKIDFSFKLYDMDSTGFIERKEVKQMLIALLGESEMRLSDDIIETILDKTFSDADANQDGKIDRTEWENFVTRNPSLMKIMTLPYLKDITTTFPSFVFNSEVDDLVT

SEQ ID NO: 72606 - protein, 312 aa, Zea mays subsp. mexicana
  Clone ID: UC-ZMFLTEOSINTE90H04_FLI.pep
SGAAAAMPSHADLDHQISQLRDCKFLPEVEVKTLCEKAKAILMEEWNVQPVRCPVTVCGDIHGQFYDLIELFRIGGDAPDTNYLFMGDYVDRGYYSVETVSLLVALKVRYRDRITILRGNHESRQITQVYGFYDECLRKYGNANVWKYFTDLFDYLPLTALIENQIFCLHGGLSPSLDTLDNIRALDRIQEVPHEGPMCDLLWSDPDDRCGWGISPRGAGYTFGQDIAQQFNHTNGLSLISRAHQLVMEGFNWCQDKNVVTVFSAPNYCYRCGNMAAILEIGENMDQNFLQFDPAPRQIEPDMTRKTPDYFL

SEQ ID NO: 72607 - protein, 582 aa, Zea mays subsp. mexicana
  Clone ID: UC-ZMFLTEOSINTE063E02_FLI.pep
SPLPAPAPGDYKGTGLGPLATAATLLRSALWRHCLPRVGMAAAGTQLGRLLVGGLWLLAALLQRGAAAAVAAVDGRRAIAATGENFVCATLDWWPPDKCDYGTCPWGRAGLLNLDLSNKVLLNAVRAFSPPLMLRLGGSLQDKVVYGTADLGRPCAPFAKNASEMHGFTQGCLTLRRWDELNAFFQKSGARIVFGINALNGRVPLPDGSMGGPWDYTNAASLIRYTANKGYRIHGWELGNELSGTGVGARVGAEQYGADVIALKTLVDDIYASHPSKPLVLAPGGFFDQAWFAQLIVRTRPNLLNVITHHIYNLGPGRDTHLIDKILNPSVLDGMRSTFSSLQGLLKSAGTSTVAWVGEAGGAYNSGRHLVTDAFVFSFWFLDQLGMSAKYDTKSYCRQSLIGGNYGLLNTTTFQPNPDYYSALLWHRLMGTKVLATTFSGTNKIRAYAHCARDSPGITLLLINLSGNTTTQVSVSVTTQGAVAAHKHGARKHVGGRKFRHVHVPSFDEAAGGVRDEYHLTPKDGNLRSQIMLLNGRALATDTAGNIPALEAVKMDAAQPIAVAPYSIVFARISHFNAPACS

SEQ ID NO: 72608 - protein, 486 aa, Zea mays
  Clone ID: LIB3245-233-C1_FLI.pep
LYIQTKRSGSIFQSLLEETVSRTQVRERREALAAAMVWSMDPQVTVHGDWVSAVVPLMKLLCLAVIGLLLANPRVQVVPRATFKLLSKLVFALFLPCLIFVHLGKSVTIDNVLHWWFIPVNVLISTAIGCALGYIVALICRPPPHLFRFTVIMTGFGNTGNLPIAIIGSVCHTNDHPFGPGCDTMGIAYVSFAQWVAVILVYTLVYHMMEPPMQFYEIVGEGNEIQQEPELVSNYSRSLLHEAEWPGMVDKETEHSKTPFIARVFMSISGSSQNTFPDIDFTEEGTSAAGPSSPKSLRCLAEPRVVRRIRVVAEKTPIQHVLQPPTIASLLAITIGMVPVLKDFVFGADAPLSFFTDSLEILAAAVVPSVMLILGGMLAEGPKDNALGMRTIIGIIVARLLVLPCIGIGVVTLADRLHLLVEENHMYRFVLSLQYSTPSAILLGAIASLRGYGVKEASALLFWQHICAVFSLSLYLVVYFKLFSFI

SEQ ID NO: 72609 - protein, 497 aa, Zea mays
  Clone ID: LIB3245-022-E9_FLI.pep
KPPPLLLRGLAQLYSRGAANQQLPEKLVADLRRHFDALPNSYAQAGYDMKDVLLHARLAEQATGEDQPAVNIEEVHGRGSCEEGTVFQLTFACTAPLSWQSMSGSLDSPSFCCKKIQIFEKRGLTLGVVMILVQTGNEALFKNQVESALKSVVKKQRKNSGGVKLPFGLCGCQEEGSRNFDEESMFDPDDGRVLDNEPAHRPQLPTPLPQASVFVSVDEWQTIRSGGEELGRWMLRSEEIEFVDWFGANPFRGVYKGKKVWVNKLRGCDMGSAYDVEIRQDLLQLMSCGQRNILQLHGVCFSENHGLCIVTRMMEGGSVHDILVQRNKRLSLRDTVRIALDVADAMAFMNGYGIAYRDLNARKILLDRQGNACLGDMGIVTPCSNVGEVTEYETSGYRWLAPEIIAGDPETVSETWMSNVYSYGMVLWEMITGEEAYSTYSPVQAAVGIAACGLRPEIPRDCPPFLRSLMNRCWDSSPLKRPQFSEITSILQRQNVR

SEQ ID NO: 72610 - protein, 871 aa, Zea mays
  Clone ID: LIB3332-043-D7_FLI.pep
PWRPWRSYRSSPSRCARRRHSSPTTTPPTTRAPIVVDLQREPGLSSKSIVLQIDSKSQQVSASALRHSLQDRLSRGASGGSGRGRVDEIYLKLRTSTAPSLKLIDLPGIDQRAVDDSMINEYAGHNDAILLIVIPAMQAADVASSRALRLAKDIDADGTRTVGVISKVDQANGDAKTIACVQALLSNKGPKNLPDIEWVALIGQSVAIASAQSVGSENSLETAWRAEAESLKNILTGSPQNKLGRIALVDTIAKQIRKRMKVRVPNLLSGLQGKSQMVQDELARLGESMVQSAEGTRAVALELCREFEDKFLAHITSGEGSGWKIVASFEGKFPDRIKQLPLDRHFDLNNVKRIVLEADGYQPYLISPEKGLRSLIKIVLEMAKEPSRLCVEEVHRVLLDIVNASANATPGLGRYPPFKREVVAIASNALETFKNDAKKMVVALVDMERAFVPPQHFIRLVQRRMERQRREDELRNRSSKKTQEAEQPTSKRASSPQTDAEQGGGSLKSMKDKSGQQDKDTKEGSNLQVAGPAGEITAGYLLKKSTKTNGWSKRWFVLNEKSGKLGYTKKQEERHFRGVITLEECNLEEVEEEEPSKSSKDSKKANGSEKISSLVFKITNRVAYKTVLKAHSAVVLKAESMADKVEWVNKIKAVIQSKGGSFKGPSTEGSSMRQSNSDGALDTMARRPADPEEELRWMSQEVRGYVEAVLNSLAANVPKAIVLCQVEKAKEDMLNQLYSSISGQSNAKIEELLQEDHNAKRRREKYQKQSSLLSKLTRQLSIHDNRASVSSYSNDTTEAESPRTPSRSGEDWRSAFDSASNGPVAGSTNSQSRSKSADGRSRRYENGDVSSGANSGSRRTPNRLPPAPPKY

SEQ ID NO: 72611 - protein, 462 aa, Zea mays
  Clone ID: LIB3354-005-A11_FLI.pep
IRRMHGYVHHHSSYRLEPRELLCEHLPELRHGLGLQRQRERDGALLPGRLHHVHEAAVVHERGPHEDGRAPAEVGVVQRHAHPADGAQVRARDAAAGQVHGVHALQVVHQRPRVVVPGAGRRQRAPGRVPHGVARHLPGRGQRRRAHHRVAEVARRERRRQARAHVHHGEEPRLGVGRERPRAARALPHQRHHGAERGRARAPRLQRRHLRLAQRHDGARVAGGAATSTAIRRRRCLGLVLRVVVRHRARAGGPRAQQPVVEAGRQGGAGAGAGAAAGDARPRLHEVGGAPGVHDRVVQGEAEHDAPAAEAGDLREQQRARRVRRGRGRHQQRPHLVARHELAHQLVQRVLLPPRRHEHRALPRAVYLHAPGGGVQPQAARQRVERHQRPGQAVLHGVGLEELRLAVRSVEVDRGRVPAPRGQVEVGQPHGARRRLLGWDDQLSRQQLHHCHALVCPSLLAS

SEQ ID NO: 72612 - protein, 417 aa, Zea mays
  Clone ID: LIB3354-117-H8_FLI.pep
TQTHREGHPSPKIDRSIATNFILATRQQLLTTGGYAFKAPDHGDDQCSHRTAHLPGDDLPALVVALAPLPEHDVGAVAHAAVVLVAVEGVEVEVDVVDHADAAEAVADVAALRPQHRLVLVAGVVGHQLDRVALALGVLDGLAGDPVDEREGRVPFLVLDAVAVAHVLDPVLVLVARVGGREAHGAVADRGAEPFVGLAVDADGGLAAAEAGRVGGAAAAPGVGLVAPGQDLPALVVALGPLPQHHGGAVVHAAVALVAVEGVEVEADVVHHADAAEALAHVAALRPQHRLVLVLRVERHQLHRVGLAEGVLDGEPSGLVDEGERRVALLVLDLGAEAHVLVPVLVLVARVGGGQHHVAVADGEAVPLVGLAEDLEGGLVHAAVRRRVLAVVAVVPEAEHLALFSALGFWGRVWGES

SEQ ID NO: 72613 - protein, 203 aa, Zea mays; identical to SEQ ID NO: 70487
  Clone ID: LIB3076-020-A6_FLI.pep

SEQ ID NO: 72614 - protein, 100 aa, Zea mays
  Clone ID: LIB3088-014-E1_FLI.pep
NDGAKLVQGMELFKLASGRAERAHRCEIWDTGPIPRQAAGLHLLPFLFHRSPSTRMPAPFRLPPKPSSSPSSGIVAGEPQPLPLPASPVRWLSPPSTAAA

SEQ ID NO: 72615 - protein, 432 aa, Zea mays; identical to SEQ ID NO: 42488
  Clone ID: LIB4569-011-H9_FLI.pep

SEQ ID NO: 72616 - protein, 414 aa, Zea mays
  Clone ID: LIB3354-115-D8_FLI.pep
LATTTYAKPPARPMDVDSDPAASSKPTQMDLEDQTNTKGKGKAEEGNGKGEELADSIGSLSIGPGRTNFKKKPVIIIVIGMAGTGKTTLMHRLVCDTQASNKRGYVVNLDPAVMTLPFGANIDIRDTVRYKDVMKEYSLGPNGGILTSLNLFATKFDEVVSVIERRAEQLDYVLVDTPGQIEIFTWSASGAIITEAFASTFPTVVAYVVDTPRSTNPVTFMSNMLYACSILYKTRLPLVLTFNKVDVAKHEFAIEWMQDFEAFQTAVESDKSYSATYTRSLSLVLDEFYNNLRSVGVSAISGSGVNTFFEAIEASAKEYMETYRADLDKRIAEKERLEEERRKENMEKLQKDMMKSKGQTVVLTTGLKEKKSVSDMMDGADEEEEEEALEDFGFSEDDEDEDEGEDEEVAHFGF

SEQ ID NO: 72617 - protein, 176 aa, Zea mays
  Clone ID: LIB3608-022-G1_FLI.pep
DCNSDAKAKPQPRMCTSSDGTIIHGASLHRHMMWHPAGCSGSHRNIGGDGPRQQAPEHGGGGYRYGQSFFLSSSSSFFFLASSSAFFFFSSSSFFFFSSSSFFLSLTSSTTTMSARQTFLRSRLIMQVMSTLSPTTSSRSLASPAIPTEFTPTNLDAICMALDRFLSFGTPSRITV

SEQ ID NO: 72618 - protein, 380 aa, Zea mays
  Clone ID: LIB4571-010-E5_FLI.pep
SSDPEEVKTPSLTTNTTPTNLPPHPRWPLLNKPPPQDKTNLLQLHLSAAETEGQPNRSPHTRNSSSMYADAGFAFAFAAAYSPTLTSSQPQPPPPPFDYAFSSEPPLLSMPAMDHDAYLGNLVQPSMVSEYDLGGEGDLFKAPEAIIEEPLLSLDPVAAAFSMMAGNGSAVMDQTIKDAGTGTIQNDPLLSEVLYECEKELMEKSTIEETISELMDVKIPMLQVEEIPSQAEQVLIQNQQLPAMEKEKQSVPECSLQKSVSSGCLNSADWMNGPARPNFLDFQGLDFEAAFGLRRAYSEGDIQNLGANTPRPAANVCVTISDLKTEERKQKLSRYRKKKIKRNFGRKIKYACRKALADSQPRVRGRFAKIEECDLLKPSK

SEQ ID NO: 72619 - protein, 297 aa, Zea mays
  Clone ID: LIB3355-044-B2_FLI.pep
GVRMASAQAVGQGERGHFVLKSGHTIPAVGLGTWRAGSDTAHSVRTAIAEAGYRHVDTAAQYGVEKEVGRGLKAAMEGGINRKDLFVTSKLWCTELAPDRVRPSLQKTLKDLQLDYLDLYLIHWPFRLKDGAHMPPEAGEVLEFDMEGVWREMEGLVKDGLVKDIGVCNYTVAKLNRLMRSANVPPAVCQMEMHPGWKNDRIFEACKKHGIHVTAYSPLGSSEKNLAHDPLVEKVANKLDKTPGQVLVRWALQRGTSVIPKSTRDERIKENIQVFGWEIPEDDFRALCGIKDEVSDG

SEQ ID NO: 72620 - protein, 141 aa, Zea mays
  Clone ID: LIB3279-003-E7_FLI.pep
ATRRPRTQPPPHRFHPRMPSSSSASSSPTPARSVTQPTPRRRSCSTRPGQAEAAGQDTSVGGGEGTGARAAAMVARSGGRGGRRAGWPRPVPPLRRQWRPPPRHGRVAPLSWTGAAPRRPSCRAATASPSSSTPGRTSVTG

SEQ ID NO: 72621 - protein, 82 aa, Zea mays
  Clone ID: LIB3355-019-A2_FLI.pep
PSNNPVVSFCTVMYQTQQHTEIPRQQRRPRHNRTTTSSYRPLVSAFKVLAPRTSWGRRNTDRPPETATSAAHETAHSPVSRW

SEQ ID NO: 72622 - protein, 227 aa, Zea mays
  Clone ID: LIB3607-008-H7_FLI.pep
SSYSFILYPPCKSTMAARLTQAHTVRLHCIALPKTDQSTNQPQPRMLRHPHLPSGHDGRCRLERLAPVHEDVLQQRVAAGVADDGVEHGARGVHGVGGEGPLPLADLGLALHLPVARQLLRGQHLLRAAGVVRVQPRHRVRRPVVVRRQLRERRGQPARRRHERLLLRRGAHRRRGEHRLVVAAGRRRRRLLQPAALLVVDAAQDPVIQPEAVLLARRAVDVGEAVL

SEQ ID NO: 72623 - protein, 501 aa, Zea mays
  Clone ID: LIB3357-055-E1_FLI.pep
YNHHFCSRDREAKLSMVSRRFKPIELCDSEGRSRQTVAADLDGTLLLSRSAFPYYLLIALEAGSLLRAVALLLSVPLVYLTYVTVSETLAVRAFIYVAMAGLEARDIEAVARSVLPSFYAGDVHPEGWRVFRSFGRRCVVTASPRLMVEPFAKAFLGADVVIGTEVEVAQSGKATGFVAGPGVLVGEHKRRAVAREFGDSLPDVGMGDRESDFDFMSICKEAYTVTRQKYRALPRDQLQGRAILHDGRLARRPTATNALLTFLWMPLGFALALVRAHLHLLLPVRALAYAYKLTGVKLVVRGNRPPPSKKKKGDQLGVLFVCNHRSTLDAVAVGVALGRKVRWVVTDGGAGASRFSEPVVSPIMTGVPLPVPTSLEGDADADAAPRIRRLLEEGDDVVVFPEGAICREPFLLRFGALFAEVTDRIVPVAIEPRESMFHGSTARGLRGMDPYFFFMNPRPTYEVTFLNQLPGELTCGGGRSPVEVASYVQEVLAAQLGFECT

SEQ ID NO: 72624 - protein, 128 aa, Zea mays
  Clone ID: LIB3607-036-G7_FLI.pep
NTALPFSVPHIGSGSNSPRSRPPAPYIGAQTPRRVARFHSILCEANSTGSAYHQIAGADKQATSQPLIHYHEGKSASIKHWSTHHFLYIYMVTDSRHDSQSTWHGRVTAETHTLHILDSSSTPQTRQI

SEQ ID NO: 72625 - protein, 92 aa, Zea mays
  Clone ID: LIB4668-003-D10_FLI.pep
TKREKGQQLQGGTVVQVHGAEQQHQARVLISSAEQTNQEIKRTGYTSTTPAGAAATKQGRKESHLKTRAHRVPRHEITLRAHCMLTHRPATW

SEQ ID NO: 72626 - protein, 268 aa, Zea mays
  Clone ID: LIB3587-210-A11_FLI.pep
SPVRPAVRGAPTTTRPARQEEEEEGTGRQRAMAAVVCVTGAGGFIGSWIVKILLARGYAVRGTSRREAADPKNGHLWALDGAAERLTMLQVDLLDRASLRAAFRGCDGVIHTASPMHDNPEEIIEPIIAGTRNVVEAAADAGVRRLVLSSTIGTMYMDPRRDPDAPLGDSSWSDLEYCKSTENWYCYAKTVAEQGAWEAARARGLDLAVVIPVVVLGELLQPSMNTSTLHILKYLTGQTKEYVNESHAYVHVRDAAEAHVRVLEAPGA

SEQ ID NO: 72627 - protein, 177 aa, Zea mays
  Clone ID: LIB3637-241-D10_FLI.pep
RGGNTSRSCWDVTSGTCTSCILRRQDAGRCSLPLDSFSPRAMHHNEPASTMKGVHGPANISNRRRCLYVLKRTDRTGLPPARRPSEDHNELAPRCLVAVSLSLHVNIGWVYKTARRVVVKATGGGRPLSSVCVVLLPLLLILKSEFGRRGLVKSVKNLQFRRVRSASIHALSFAVAV

SEQ ID NO: 72628 - protein, 258 aa, Zea mays
  Clone ID: LIB3591-102-F5_FLI.pep
NLKETRHQLDLVLPPFARLLCFSPIRYVRCGEASRAAGAPTAIGLLLCCCDGGVVVGARGRRAPPVLHACRVRFLRVQFGPADGGAAEGDRLRVRSAGGRRLHGHPAGRRVLQPQHRRRALLLGRQQLLPEQQGQGRHLRFRRRRRRLHHRPQFLRVHFRFQCHQRWRWDRDGGYHHRHHDRGRCDDGHPEPWRGHRRPQRHGDGRQHRPGTGGQHPGRRRARPAPRRRIPRRRRRRPLLARPAAALITWASCLLCGP

SEQ ID NO: 72629 - protein, 452 aa, Zea mays; identical to SEQ ID NO: 60113
  Clone ID: LIB3591-102-G3_FLI.pep

SEQ ID NO: 72630 - protein, 526 aa, Homo sapiens
  Clone ID: LIB4219-030-G2_FLI.pep
GRHQGSCPMDRAPQRQHRASRELLAAKKTHTSQIEVIPCKICGDKSSGIHYGVITCEGCKGFFRRSQRCNAAYSCTRQQNCPIDRTSRNRCQHCRLQKCLALGMSRDAVKFGRMSKKQRDSLHAEVQKQLQQRQQQQQEPVVKTPPAGAQGADTLTYTLGLPDGQLPLGSSPDLPEASACPPGLLKASGSGPSYSNNLAKAGLNGASCHLEYSPERGKAEGRESFYSTGSQLTPDRCGLRFEEHRHPGLGELGQGPDSYGSPSFRSTPEAPYASLTEIEHLVQSVCKSYRETCQLRLEDLLRQRSNIFSREEVTGYQRKSMWEMWERCAHHLTEAIQYVVEFAKRLSGFMELCQNDQIVLLKAGAMEVVLVRMCRAYNADNRTVFFEGKYGGMELFRALGCSELISSIFDFSHSLSALHFSEDEIALYTALVLINAHRPGLQEKRKVEQLQYNLELAFHHHLCKTHRQSILAKLPPKGKLRSLCSQHVERLQIFQHLHPIVVQAAFPPLYKELFSTETESPVGLSK

SEQ ID NO: 72631 - protein, 350 aa, Zea mays
  Clone ID: LIB3245-339-D1_FLI.pep
TDLPSPLSPPSPSGVETKGARVSPGAVSRAEGEGLKEATMQVKQKVYEFYKGTVERVTAPRTVSAFLEKGVLSVPEFILAGDNLVAKCPTWSWEAGDPSKRKPYLPANKQFLVTRNVPCLRRAISVEEEYDAAGAEVVLDEDGEGWLATHGVQASKTEEEEDIPSMDTLDIGRSDGIKSIPSYFSGGKDEEEEDIPDMDTYEDTGDNLAAAEPSYFIAEEPEDDNILHTRTYDVSITYDKYYQTPRVWLTGYDESRMPLMPELVFEDISQDHARKTVTIEDHPHLLAGKHASVHPCKHAAVMKKIIDVPMSGGVEPEVDKYLFIFLKFIATVIPTIEYDYTMDVDLGSTS

SEQ ID NO: 72632 - protein, 324 aa, Zea mays
  Clone ID: LIB3607-053-D4_FLI.pep
PKRVGADTKPHTRKASYAMETESAKLKRNARKSPAVPFEPSQTNTTIENEKTRRNPRKLSSTPAESVPDGQLTELEKVKRSLRKVTSSMVETSKVPSPTTEIPDRQEVQCERPLRSAKQAPIHVENQEPQNVNLSDNAKMDILVPDIQPDVEVASDLVTITNEEKVDETPSVVAPATEIMPLQDINSEENALVNDVEERSKEEHPSTDNLKGSKRRSSFSVKPEYPENGSKNSPALPSYMAATQSAKAKLRGNCSPRLSSDSAEKNGFTRRHSLPSPNNGKIISHSPRTQRPTHAGGKDGAKGDKAMLSSRDASERPLKAEWRR

SEQ ID NO: 72633 - protein, 312 aa, Zea mays
  Clone ID: LIB3732-007-G12_FLI.pep
FIYRVQTGICGSLQRQWQCRGGSQRKGLAVDVEHLRARQVRFLHAAEVDDLAGGCAGALQLLVAAAGVGHDGFHGGEQAAVGDPLGLAFHRLDEAVGHGPHRRAGLRRHAELAFAVAVAADKHRLAAARALADARRWTVILPLPVPGPGHVAEEGEVEDGIAVARVDDGVELGAGHHRPDDGLVDLVVQDGALLERVHRADGLVVPVLLVAVRVGDLRAQPREVEHQGVAAAAPLHQPLHRHPDVVLGGHPERVLLVVSEHDDAVAGEGEALAEELPHALDVVDGAPQLAAAPARAAVRDADQDGALLAAAA

SEQ ID NO: 72634 - protein, 207 aa, Zea mays
  Clone ID: LIB3594-008-B1_FLI.pep
SSMAMAKAGAPRVSAAQLVTLGLSLLCAVAGPAAAQNCGCQPNVCCSKFGYCGTTDEYCGDGCQSGPCRSGGGGSSGGGGANVASVVTGSFFNGIKSQAGSGCEGKNFYTRSAFLSAVKAYPGFAHGGSQISATSARSTRATPTATRPRGSGRAPRGRSTTGAARCRSRGTTTTGPRGGPSASTGSGTPAGWRGTPWWRSRRRSGSG

SEQ ID NO: 72635 - protein, 457 aa, Homo sapiens
  Clone ID: LIB4809-016-A10_FLI.pep
GRCSPGRRPASSGRPAEGGRHGGRRGAACPVRPLRQAAPHRPAHLVEEAIVHELRGEVLGAVRWEQVVGQLPVQPVFQHQKQSEMPARLVLASLQVALHLDDLSGLRVKGLWRRGLGLLDLLRGWGQHTGQPQGSSGCKVHQWVDSIPDILQEFVQLHEGDLRVPPLQRGPAGPGKLRQDRVQVHGLGLLLHHILRHEVLVLDEAVGCQELQRVHLEEHAVEEEAVGRGPAGRVPGQAAKDELPHVGVTQRVPGASNGLLCDPGVPIGLDFQYSHLQRTHPKGEDVHSGPIGHLSILWGEEVQVPKFLSLSADGASEIIWKCIGEDSVPHGADLDEAVVLNEDGVAGQVPVDDWGAAGVQEAERRQDLRAPALPGLAADARLRRSGGRRRGGWACGARPASSPSPCPRPPGTPSPSQSPRLPQPRPVPVAAPARSPYPGVHGLVVLLGLFEELLEAA

SEQ ID NO: 72636 - protein, 427 aa, Zea mays; identical to SEQ ID NO: 42341
  Clone ID: LIB3594-015-B6_FLI.pep

SEQ ID NO: 72637 - protein, 178 aa, Zea mays
  Clone ID: LIB3594-015-D1_FLI.pep
EISLLPVSFLCSELPSALSRALSGFLGLCSTKPSKPKGSEDSSPSSEAATICFAVGHCVSFCLQQQELQLHHFSSSAVATEMVSKIFPTRQATSGYMVGAVTLTKEPSATSHLGDHRAAHEESQGRETQMTSPISRTMGSGSFANSSKSTMLSWSALSQGLQRLHAWPLDAHRHSSRP

SEQ ID NO: 72638 - protein, 162 aa, Zea mays
  Clone ID: LIB3594-022-A10_FLI.pep
RKCVVTMVHFKNRYMVVEIFIDAGRGEQDPIILTQFNITKVIKDSIQLNFGECGLAGSLGSLQVKYVNPVTKLCIVRVSREDHQKVWAAMTMVRCIGKIPVSFNLLDMSGKWLRLWMMVQNNDIALPFYVVVFNQTGACFGARRTFQKQHISVVNSVFLLKL

SEQ ID NO: 72639 - protein, 367 aa, Zea mays
  Clone ID: LIB3594-040-G11_FLI.pep
AVSDCLLQGANGHHQRQQLPSGFVILPRWVPSPTMRAEPAAEEPDICENKCRPAGSEALPRGIVQDKSNFEMESLGGNPERKEKKGNGRHSKSLLAIPVGIKQKAIVDKLVSKFPDTNFIVMLFHYDGEVDGWRDLEWSGRAIHVGVRDQTKWWFAKRFLHPDLVAEYDYVFLWDEDIEVDSFDPLRYLRVVREERLEISQPALDRRSQIHHRLTARAARSGGVHRRYYKTSGHGRCYGNSTGPPCAGWVEMMVPVFSRAAWRCAWHMIQNDLIYAWGMDYKLGYCAQGDRSRNVGVVDSQYVLHRGIPTLGDGGKATATAAASADRLAVRQRSYTELQLFNRRWKKAVAEDGCWTDPYPNPATTTG

SEQ ID NO: 72640 - protein, 476 aa, Gossypium hirsutum
  Clone ID: LIB3582-053-F9_FLI.pep
LNMIYPSEMIKSTSFFHPTNSVSLPNLSTGGFVWKRKGYSTAIGRIRRLQCSAQAPHPPPAWPGRAFPHPGHKTWDGPKPISIVGSTGSIGTQTLDIVAENPDKFRIVGLAAGSNVTLLAHQVKTFKPQLVAVRNESLVNELKDALADMEQKPEIIPGEQGVIEVARHPDAVSVVTGIVGCAGLKPTVAAIEAGKDIALANKETLIAGGPFVLPLAHKHKVKILPADSEHSAIFQCIQGLPECALRRIILTASGGAFRDLPVDKLKDVKVADALKHPNWNMGKKITVDSATLFNKGLEVIEAHYLFGAEYDDIEIVIHPQSIIHSMVETQDSSVLAQLGWPDMRLPILYTLSWPERIYCSEITWPRLDLCKLGSLAFKAPDNVKYPSMSLAYAAGRAGGTMTGVLSAANEKAVELFINEKISYLDIFKVVELTCEKHQEELVATPSLEEIVHYDSWARDYTAALQCFSSGLSPVPA

SEQ ID NO: 72641 - protein, 308 aa, Glycine max
  Clone ID: 700698053_FLI.pep
SSHCFASKLKTQNVVVSLSLTLTLLVSSTSTKVKVRERDTTTFWVLVLLTSKANSAETVSFSWNKFVPKQPNMILQGDAIVTSSGKLQLNKVDENGTPKPSSLGRALYSTPIHIWDKETGSVASFAASFNFTFYAPDTKRLADGLAFFLAPIDTKPQTHAGYLGLFNENESGDQVVAVEFDTFRNSWDPPNPHIGINVNSIRSIKTTSWDLANNKVAKVLITYDASTSLLVASLVYPSQRTSNILSDVVDLKTSLPEWVRIGFSAATGLDIPGESHDVLSWSFASNLPHASSNIDPLDLTSFVLHEAI

SEQ ID NO: 72642 - protein, 394 aa, Zea mays; identical to SEQ ID NO: 56351
  Clone ID: LIB3594-056-C8_FLI.pep

SEQ ID NO: 72643 - protein, 69 aa, Zea mays
  Clone ID: LIB3060-103-H8_FLI.pep
LGAATAVDGNRVVSTPSIRFVRVVATPSCLCRGGVHDTDHSSYDKGHQAQGEHRGVLLPHDLVSPQSAT

SEQ ID NO: 72644 - protein, 471 aa, Zea mays
  Clone ID: LIB3594-058-C9_FLI.pep
PFPLLPIPSVGRRSIPYDDTMRECISIHIGQAGIQVGNACWELYCLEHGIQADGQMPGDKTIGGGDDAFNTFFSETGAGKHVPRAVFVDLEPTVIDEVRTGTYRQLFHPEQLISGKEDAANNFARGHYTIGKEIVDLCLDRIRKLADNCTGLQGFLVFNAVGGGTGSGLGSLLLERLSVDYGKKSKLGFTVYPSPQVSTSVVEPYNSVLSTHSLLEHTDVAILLDNEAIYDICRRSLDIERPTYTNLNRLVSQVISSLTASLRFDGALNVDVNEFQTNLVPYPRIHFMLSSYAPVISAEKAYHEQLSVAEITNSAFEPSSMMAKCDPRHGKYMACCLMYRGDVVPKDVNAAVATIKTKRTIQFVDWCPTGFKCGINYQPPSVVPGGDLAKVQRAVCMISNSTSVVEVFSRIDHKFDLMYAKRAFVHWYVGEGMEEGEFSEAREDLAALEKDYEEVGAEFDEGEDGDEGDEY

SEQ ID NO: 72645 - protein, 50 aa, Zea mays
  Clone ID: LIB3114-046-F9_FLI.pep
GLVGDCNLLVDYSPILLCNLLRHQHSLQHILCTYVLVVAEISIKITRYWR

SEQ ID NO: 72646 - protein, 432 aa, Zea mays
  Clone ID: LIB3595-019-D9_FLI.pep
PYLHSSPSLHVTTIAIQEQIKRDTGNKERHGPSRRSSCPASAPVRPRRPASSRGRRGRVREGPGHPLRAGRQAVLRQRVQRLLAHDIRRRPRAEGQGHLGGGSALQYSPGRYNENTFQGLDFVLSEARKHGIKMILSLVNNYDSFGGRKQYVQWARERGQTIGSDDEFFTNPFVKGIYKNHIKAVLTRVNTITGVAYKDDPTIMAWELMNEPRCQSDVSGHAIQSWITEMAAHVKSIDGNHLLEAGLEGFYGASSARRSANPSGYQVGTDFIANNRAPGIDFATVHSYPDQWLGGLDAQAQLRFLGAWLDAHIADARAVLRKPLLVAEFGESRHDPGYSGGQRDAVFGTVYARVYDSARAGGPAAGALFWQLLAEGMDSYGDGYEVVLPQAPSTAGVIATQSRRLQGLARAFVRARKAHQGKAGKGAKGGGN

SEQ ID NO: 72647 - protein, 307 aa, Zea mays
  Clone ID: LIB3205-046-A6_FLI.pep
RARARRPSNHRENKSQPNSPVSQRSLSLHYSTMSSMELLHAVVPEKQSEEEVAPAATTTSSSATATGGDEGAHVPQGWAKRKRSRRQRSEEENLALCLLMLSRGGHHRVQAPPTPVPSAAEFRCSVCGKSFSSYQALGGHKTSHRVKLPTPPPPAAAAAAVTVPAAVPVPEAPAPITVVVPPLPPVEVGREPATSSTAASSDGAASSRVHRCSICHKEFPTGQALGGHKRKHYDGGVGSAAASTDVPAAPAETSAEVGSSAARAFDLNLPAVPEFVFRCGKPGKMWEEDEEVQSPLAFKKPRLLMTA

SEQ ID NO: 72648 - protein, 231 aa, Zea mays; identical to SEQ ID NO: 43391
  Clone ID: LIB3597-045-D3_FLI.pep

SEQ ID NO: 72649 - protein, 186 aa, Zea mays
  Clone ID: LIB3600-021-B3_FLI.pep
RKGSSRRTLGASSSQLPRRRSLFSSLRSMFRNTRSVWCGRIRCRRRSWRARDRLLLVSGRRLPFSDQFLRPDLEVVGIYADIYTKLALDSACWFVLLGWVTVFTLASIVSRGAVRFSVIAALLGFCSYRSRKEGMVCLYVYSGYVVTDLIGCSCSLAASHSHCVMEWDDDVLCPEQTNKKKTNYAM

SEQ ID NO: 72650 - protein, 206 aa, Zea mays; identical to SEQ ID NO: 50655
  Clone ID: LIB3600-045-F12_FLI.pep

SEQ ID NO: 72651 - protein, 221 aa, Zea mays; identical to SEQ ID NO: 42616
  Clone ID: LIB3600-019-C11_FLI.pep

SEQ ID NO: 72652 - protein, 289 aa, Zea mays
  Clone ID: LIB3632-055-B11_FLI.pep
HASTPFPSMATTTSSSSLTTPLLRPNPNTNPAPRSLQLLRSRRCARAVTTAVAGGAVPYGANPRRGIWSIRDDLVVPRSPYFPVESAAGQERGPSPMVMERFQSVVSQLFQHRIIRCGGPVEDDMANIIVAQLLYLDAIDPNKDIIMYVNSPGGSVTAGMAIFDTMKHIRPDVSTVCIGLAASMGAFLLSAGTKGKRYSLPNSRIMIHQPLGGAQGQETDLEIQANEMLHHKANLNGYLAYHTGQPLDKINVDTDRDYFMSAKEAKEYGLIDGVIMNPLKALQPLPASS

SEQ ID NO: 72653 - protein, 291 aa, Zea mays
  Clone ID: LIB3600-026-B12_FLI.pep
PLHCWMKHGPLSRGAPSLVIIFILLTTLFIILVIDLRLGLVRLLFIFLLFLLGRSLLSCSALALVVGSDGLVVLELELVSLGYIGSLVRLAQGFPPVASSFPHRSDRLVLRVLLLELLAKFLHEHEESAGSPLRLVGVLAGLPFPALGGLLRPLALHRQPADAKAIESTTTTTETATAKQRRREKKRSKSTRGGGCHNNRNRMLRTPRNRSTGRTRKKRTGDSFFLLGIGLGGALGFGPLHGGFERRHGAQRSDPRLAEGIPVAGGRIGVESRAKLPLAARGEREGGKGKG

SEQ ID NO: 72654 - protein, 333 aa, Zea mays
  Clone ID: LIB3600-048-C1_FLI.pep
IYIEHFVQTAAAAMASAAGSEEACREIRGTCGAPRRLGLLLAPRSPAERQQIRAAYRARFGEDLAATLAAPNTNQVDELSKLLYLWALEPAERDAVVAREAVEGGVTAAGYRALVEVFTRRKQDQLFFTKQAYAARFRRSLDQDMATEPSHPYHRLLLALAASRRSHHDDLSQHVAKCDARRLHDTKNSGAGAGSGSVVDEAVILEMFSKRSIPQLRLAFCRYKHIYGHDYTKALKINGSGEFEGPLRVVVKCIYNPSKYYSKLLHRSMLPAATDTRMVTRAILGSDDVGIDEIRSAFQSSYGKSLAEYIQENLPGSDYRDFLVAVASASVAQ

SEQ ID NO: 72655 - protein, 199 aa, Zea mays
  Clone ID: LIB4172-017-E12_FLI.pep
HGLRHCRSVHHSFHTTRPLVQTSEKRLRNGPPAYPAGRLCALPADAAGELDVLGHDGDALGVDGAEVGVLKQADEVGLGSLLQRGDGGGLEAEVGLEVLRDLADQALEGQLADEQLRALLVLADLAQRHGARAEAVRLLHAAGRRGRLARRLGRQLLPRGLAARGLARRLLRASHLCGDLGWGRRESVGARVFRMEMNE

SEQ ID NO: 72656 - protein, 364 aa, Zea mays
  Clone ID: LIB3600-059-G10_FLI.pep
PYSDDESEAMKGKKPVKELKLTVPAQETPVDKFLTASGTFKDGELRLNQSGLRLISEENGDEDESTKLKVEDVQLSMDDLEMIQVIGKGSGGVVQLVRHKWVGTLFALKGIQMNIQESVRKQIVQELKINQATQSPHIVMCHQSFYHNGVIYLVLEYMDRGSLADIVKQVKTILEPYLAVLCKQVLEGLLYLHHQRHVIHRDIKPSNLLVNRKGEVKITDFGVSAVLASSIGQRDTFVGTYNYMAPERISGSTYDYKSDIWSLGLVILECAIGRFPYIPSEGEGWLSFYELLEAIVDQPPPSAPADQFSPEFCSFISSCIQKDPAQRMSASELLNHPFLKKFEDKDLNLGILVENLEPPMNIPE

SEQ ID NO: 72657 - protein, 197 aa, Zea mays
  Clone ID: LIB3606-061-F7_FLI.pep
FSSVSKETEFDFWGFIFVTLAAVMSGFRWSMTQILLQKDSYGLKNPITLMSHVTPVMAIATMILSLLLDPWSEFQKNSYFDNPWHVMRSCLLMLIGGSLAFFMVLTEYILISATSAITVTIAGVVKEAVTILVAVFYFHDEFTWLKGFGLFTIMVGVSLFNWYKYERFKRGQINEDDVSSPFTGDVKYIIIDDLEYQ

SEQ ID NO: 72658 - protein, 273 aa, Glycine max
  Clone ID: LIB3138-010-F7_FLI.pep
SKPKPTYLFTSFSSSSSSSSSFFSSTTPPRSTMLHHDPLVSDVYATAISGVVALSFLRLFQETAKRDLFDQKLNRKLVHISIGLIFMLCWPLFSTETWASFFAALIPGINIFRMLVIGLGILKDEATVKSMSRFGDYRELLKGPLYYAATITLAAIIYWRTSPISIAAICNLCAGDGMADIVGRRLGGEKIPYNKNKSFAGSIAMATAGFLTSIGYMWYFSSFGFIEGSWKLVLGFLLVSIVTAFVESLPISTELDDNLTVPLTSILVGSIIL

SEQ ID NO: 72659 - protein, 674 aa, Zea mays
  Clone ID: LIB3607-013-G5_FLI.pep
GHVESTRRPVVSPRCSPGPTSHALRPRHPLPSVRLNPPSHSATPAPRPLLSEATPRALLPCPVSGPPAPSARQPAVTEARSGPREKSLLYLMAMIDEPLYPIAVLIDELKNEDIQLRLNSIRRLSTIARALGEERTRKELIPFLSENNDDEDEVLLAMAEELGVFIPYVGGVEHAHVLLPPLETLCTVEETCVRDKAVESLCRIGAQMKETDIVDWFIPVVKRLAAGEWFTARVSSCGLFHIAYPSASDQLKTELRTIYGQLCQDDMPMVRRAAASNLGKFAATVEQNHLKTEIMSIFDDLTQDDQDSVRLLAVEGCAALGKLLEPQDCVAHILPVIVNFSQDKSWRVRYMVANQLYELCEAVGPEPTRADLVPAYVRLLRDNEAEVRIAAAGKVTKFCRILNPQLSVQHILPCVKELSSDSSQHVRSALASVIMGMAPVLGKDATIEQLVPIFLSLLKDEFPDVRLNIISKLDQVNQVIGIDLLSQSLLPAIVELAEDRHWRVRLAIIEYIPLLASQLGVGFFDDKLGALCMQWLEDKVFSIRDAAANNLKRLAEEFGPEWAMQHIIPQVLEKINNPHYLYRMTILQAISLLAPVMGAEITCQKLLPVVINSSKDRVPNIKFNVAKVLQSLVPILDQSTVKPCLVELSEDPDVDVRYYANQALQACDQMMVSS

SEQ ID NO: 72660 - protein, 339 aa, Arabidopsis thaliana columbia; identical to SEQ ID NO: 55855
  Clone ID: LIB3175-033-C6_FLI.pep

SEQ ID NO: 72661 - protein, 367 aa, Zea mays
  Clone ID: 700237036_FLI.pep
ANYMQSQASRMARSSGSRPVALVLLALCAAALSSATVTVNEPIANGLSWSFYDVSCPSVEGIVRWHVAEALRRDIGIAAGLIRIFFHDCFPQGCDASVLLSGSNSEQIEVPNQTLRPEALKLIDDIRAAVHAVCGPTVSCADITTLATRDAVVASGGPFFEVPLGRRDGLAPASSDLVGTLPAPFFDVPTLIESFKNRSLDKADLVALSGAHTVGRGHCVSFSDRLPPNADDGTMDPAFRQRLTAKCASDPSGNVVTQVLDVRTPNAFDNKYYFDLIAKQGLFKSDQGLINHPDTKRAATRFALNQAAFFDQFARSMVKMSQMDILTGSAGEIRRNCSVRNTALGDVSSSAHQLETTAGDEGLAADA

SEQ ID NO: 72662 - protein, 552 aa, Glycine max
  Clone ID: 700555303_FLI.pep
CGRWLCCLICFFFLYFSLLGLVGVGGLFVVDLSVVRNKDPEWFFFCPQDRKYPNGHRLNRATSHGYWKATGKDRRIKSGSTLIGMKKTLVFYTGRAPKGKRTNWVMHEYRPTLKELDGTNPGQNPYVLCRLFKKQDESLEASNGDDVDRTASTPMTANYSPDEIQSDSALVPASSSQVTEDDKPLPVISENSEEAISNIITPGEIHSDGCNAPDAQDQIVEPVAEEDQPLNVDIFYDPTNLPLDDKLFSPVHAHFPTDFYYQANNQSELQYGTNENISEFFDSVVNWDAFSHDTSSLDLSSSFLINNTDNGSGSDSDVEMTNMPHLQALHNYPKEAVEQKSNVGLFQNNFQMALSNDSTMGQVHNMVNYCEQPRNFDAFVSADTGIRIRTRPGRNEQPNMDTMVQSQGIAPRRIRLGVVRRPLGSQDGSCACAPEDHNSKTIITAEKKASESENHAADGSSTVSDMSSTVTDDVDEPEEASPESTDLRNISEKHVATAESVAGSKVLLVNRRVHYTSKVSSNRATWSNVLAVSAAVLVSAILLVNIWAYVRS

SEQ ID NO: 72663 - protein, 116 aa, Zea mays
  Clone ID: LIB3607-002-F8_FLI.pep
QFIGTKHTHPLFGDGHARMTCPSYSFYRFDSQPMWGASATVSTKMRTRLGRKSMVTGVPTGSTTMSASGLSHRITLLASSRLSPTTSGQDFLAPSSPPVELMVLGCRWRTERAIIN

SEQ ID NO: 72664 - protein, 215 aa, Zea mays
  Clone ID: LIB83-001-C7_FLI.pep
PEFADADEEKLYDFLNIELESDLNLKRMRHYEVVYLIHEDRVEEVENVVSKVQDFIREKKGRIWRLNNWGLRRLAYKIKKATHANYILMNFEIESRYINDFKTLLDKDERIIRHLVMKRDEAITEDCPPPPVFHTLRAQQYFDDEYEDEGEEEEDEDARSEPKSANYDEDDVEADDEPEIIYVDEADEDNYEDTRRRNTKLKVKKYTSEKVLRQH

SEQ ID NO: 72665 - protein, 652 aa, Zea mays
  Clone ID: LIB3608-054-F7_FLI.pep
SGSRVAPQCSTSAADPVAASFLSSSCGPAPPLLQRAAAMARRHGWQLPAHTLQVVAITVYSVLCIAFYAFFSPFLGKDLYQYIAVGIYSFLALSVLILYVRCTAIDPADPGILISMDDILIYKSEAHVDTQDEAGKPGLRNDEDIRKHKSCFGRVCFCCAIFTTGDCRGGDEANHQEDYGEEALFCTLCNAEVRKHSKHCRSCDKCVDGFDHHCRWLNNCVGRKNYITFLCLMAVSLAWLAAECGVGIAVFVRCFTDKTVIEDQIGEKLGYGLSRAPFATIVALATALSMLASVPLGELFFFHMILIRKGITTYEYVVAMRAQSEPPGPSVNDDQQSLASSPMSSAPTAFSGSSFARHYKGAWCTPPRIFIDQDEIIPHLEPGRVPSTVDPDTTDPMERTKTHPKRPVRISAWKLAKLDSNEAMKAAAKARASSSVLKPINTRNQYEADSDSLSSRNSVISADTGHHRYPRSCGNSQYKPSYPPSRASADDIELYPQTPSSFQSNSRTSTPIAEHHPSKHFNPIYQTSANRSPFSAKASVSEAPVSEITNAGRSYPPPQADRSSRSSVYWDQEAGRFVSAQANQGSSSRPGYPDLLYTGQNIFFGGPLIADPAARSFRDPGGSSQRSAGPRSHQLPVFVPSDPQKDQLSRLP

SEQ ID NO: 72666 - protein, 148 aa, Zea mays
  Clone ID: LIB3608-037-F2_FLI.pep
HPRHSSNNTSPVTARVTRTITHTDRARMSMRTCCVGFCGAGGASRRATPPTTAREEEEAAEATTQLRRAAADGPRARSRERRAAAALPASSSGGAARGSGSSAAGVGGAARGSVAMAPWPGGKGRRVIRFGGARRPPAELASPPPNNN

SEQ ID NO: 72667 - protein, 886 aa, Homo sapiens
  Clone ID: LIB4676-020-E9_FLI.pep
KKKRSSSRSRHSSISPVRLPLNSSLGAELSRKKKERAAAAAAAKMDGKESKGSPVFLPRKENSSVEAKDSGLESKKLPRSVKLEKSAPDTELVNVTHLNTEVKNSSDTGKVKLDENSEKHLVKDLKAQGTRDSKPIALKEEIVTPKETETSEKETPPPLPTIASPPPPLPTTTPPPQTPPLPPLPPIPALPQQPPLPPSQPAFSQVPASSTSTLPPSTHSKTSAVSSQANSQPPVQVSVKTQVSVTAAIPHLKTSTLPPLPLPPLLPGDDDMDSPKETLPSKPVKKEKEQRTRHLLTDLPLPPELPGGDLSPPDSPEPKAITPPQQPYKKRPKICCPRYGERRQTESDWGKRCVDKFDIIGIIGEGTYGQVYKAKDKDTGELVALKKVRLDNEKEGFPITAIREIKILRQLIHRSVVNMKEIVTDKQDALDFKKDKGAFYLVFEYMDHDLMGLLESGLVHFSEDHIKSFMKQLMEGLEYCHKKNFLHRDIKCSNILLNNSGQIKLADFGLARLYNSEESRPYTNKVITLWYRPPELLLGEERYTPAIDVWSCGCILGELFTKKPIFQANLELAQLELISRLCGSPCPAVWPDVIKLPYFNTMKPKKQYRRRLREEFSFIPSAALDLLDHMLTLDPSKRCTAEQTLQSDFLKDVELSKMAPPDLPHWQDCHELWSKKRRRQRQSGVVVEEPPPSKTSRKETTSGTSTEPVKNSSPAPPQPAPGKVESGAGDAIGLADITQQLNQSELAVLLNLLQSQTDLSIPQMAQLLNIHSNPEMQQQLEALNQSISALTEATSQQQDSETMAPEESLKEAPSAPVILPSAEQTTLEASSTPADMQNILAVLLSQLMKTQEPAGSLEENNSDKNSGPQGPRRTPTMPQEEAADGV

SEQ ID NO: 72668 - protein, 241 aa, Zea mays
  Clone ID: LIB3608-004-D12_FLI.pep
TFQFHSASAAGRRLRNSDSPTTRIHRRMSEEDKAAASAEQPKRAPKLNERILSSLSRRSVAAHPWHDLEIGPDAPAVFNVVVEITKGSKVKYELDKKTGLIKVDRVLYSSVVYPHNYGFVPRTLCEDNDPMDVLVLMQEPVVPGSFLRARAIGLMPMIDQGEKDDKIIAVCADDPEYRHYNDISELSPHRLQEIKRFFEDYKKNENKEVAVDAFLPATTAREAIQYSMDLYAQYILQSLRQ

SEQ ID NO: 72669 - protein, 293 aa, Zea mays
  Clone ID: LIB3060-069-B8_FLI.pep
VAHVCADDRVRSKFASVLHLSGDDDFLLNTVHHEKAMLLGVSSLVVVELVSDVGDEEWDAFYSFVARAAGAGSKVIVIAKHARSVARFGGSARPPIFLGALSYEEFWYLFKNLAFQAADPGEHPRLVHIAEGFAKELHQGGSLVAANALADVLRRNLNAQVWLSILNRCRRVVEKNLCAYGQQPKLLLEQGREVDITEFVVPSPAGIGHLRMIPCTSRGSSKAYSRVVNDLPKVAFGELLLDPSVRPKGEFSLLTWKSRLPPYTSFTNFVPNCTADMPQGHSLSGRKRQAVPF

SEQ ID NO: 72670 - protein, 258 aa, Zea mays
  Clone ID: LIB3245-067-F8_FLI.pep
RRPAAAGRRRRRCGAQVAHVAAGEHVQRVPAGRRRRHRGEGRVRGGVPVLPVPVRQLLRPGRPVPAVGVRVRRAARRAPPRQRQDHRRLGRDRLRVLPQSRRARWKEMRRGGERGRDEGDRHQRAVAGAGGGRPGLALRPVVGARLRPAGGAAGGRGVEESGGALRRRRGGPGDKGPQDRRRRRCPPRHGLSLTPRIGTSPPHLRTALFFERTAETENDGIILVIRICKIRRKRRRRSELIKLIVKACCMCMNARACP

SEQ ID NO: 72671 - protein, 404 aa, Zea mays
  Clone ID: LIB3608-051-C10_FLI.pep
STLSLHVHTTPPPMAAVAEEEVIVVGAGQSGLAVAACLSLRGVRALVLERDDCVGSLWRKRAYDRLHLHLTKKYCALPHAPHPAEAPAYLHRDDFARYLDGYAARFAVRPRLRREVRSARYDPASARWEVEAVDLGTGQAERYAARFLVVASGENAEKFLPEVPGLEAFPGQVMHAVEYRSAEGMRGKAVLVVGSGNSGMEIAYDLAAAGAVTSIVVRGELHLVTKEIWNVAMTLYPYLPVWVIDKLVLLMCAVVFGDTSRHGLRRPAIGPFTMKLTTPGYPVVDVGTYAKIRSGEIRVLPAAVKSVRGNVVEFGDGSRHPFDAIVFATGYRSTVRRWLKSEDGLVGDDGMAARSYPEHWKGDHGLYCAGMVRRGIYGSCEDAELIAADISKLLHPKQEQGNGV

SEQ ID NO: 72672 - protein, 225 aa, Zea mays; identical to SEQ ID NO: 70341
  Clone ID: LIB3245-566-E11_FLI.pep

SEQ ID NO: 72673 - protein, 730 aa, Zea mays
  Clone ID: LIB3632-019-D8_FLI.pep
IPVPPANTLGSPVPLAVSRRNDWPAAAATADLRAKVRIFGTFAGEHPPGFFFCTSKMYRASNFIPDPNQVLLDAKPLRSLAPMFPAPMGVNVNQSSTPPLVCVTPVGQFSAGFGAGNLPAFGSFTTFSATSNGVSYAGTSANGAIDATPISAYKTRSNISLDGDDDPYSGNQTERKPRRGRPPGSGRDGSNGKLKRPKPTYKNFVAGKELAFLAASSDPRDIVEAVHMTFEALRRRHLQMDETQDASRRADLKAGAIMMASNIRANSGKRVGTVPGVEIGDIFYFRMELCVIGLHAPSMGGIDYMTSKFGNDEDSVAICIVSAGGYENDDDDTDVLVYSGQGGNSRNTEERQDQKLERGNLALERSLHRKNEIRVVRGFKDPFCLTGKIYIYDGLYKIHESWKEKTRSGINCFKYKLLREPGQRDGAALWKMTQKWIDDPATRGRVLLADLSSKAETIPVSLVNEVDHEKGPAHFTYTNQVKYVRPLSSMKKLQGCGCQSVCLPGDASCACGQHNGGDLPYSSLGLLSCRKPMIYECGESCNCSTNCRNRVTQKGPRLHFEVFRTTNRGWGLRCWEPVRAGSFICEYAGEVIDELKVNLNDTEDDYIFQTVCPGEKTLKWNCGPELLGEASTYVSADEFEPLPIKISAKNMGNVSRFMNHSCSPNVFWQPVQYDHGDDGHPHIMFFALKHIPPMTELTYDYGVAGAESSGSGSRRTKNCMCGSQNCRGLF

SEQ ID NO: 72674 - protein, 234 aa, Zea mays
  Clone ID: LIB3354-113-B9_FLI.pep
PEEGNQGTSDPSTNMESVELVSHIEEMKLNTTTHVDASSSGYPGFLEPDDVSIECIKISVAPLHQFGRRSSIQHRDCPLQLCCAGLKVQFGVSTKFLDNAGRPKMSIVVEIPENLCKVLEFCDVLARKLSQESGSSSEWRPLIKKYGYINRPTIRLNIPPISNSDAVAFSTDICQREPSGNIQKLAFGNVGTTELDSLFVKGSKVDAFFSLELYDYQQNAGIRLVAKRLVIHSN

SEQ ID NO: 72675 - protein, 276 aa, Zea mays
  Clone ID: LIB3632-014-C5_FLI.pep
TPLPLSLFAVRSSAPQSNRHLTEMGRKFFVGGNWKCNGTTDQVEKIVKTLNEGQVPPSDVVEVVVSPPYVFLPVVKSQLRQEFHVAAQNCWVKKGGAFTGEVSAEMLVNLGVPWVILGHSERRALLGESNEFVGDKVAYALSQGLKVIACVGETLEQREAGSTMDVVAAQTKAIAEKIKDWSNVVVAYEPVWAIGTGKVATPAQAQEVHASLRDWLKTNASPEVAESTRIIYGGSVTAANCKELAAQPDVDGFLVGGASLKPEFIDIINAATVKSA

SEQ ID NO: 72676 - protein, 108 aa, Zea mays
  Clone ID: LIB3591-080-C6_FLI.pep
RAALLRPRSTSFSGRFHMERAASSCASLLAQRRCYSVAAVVVKGCGRKAVEKVAKRIMGKEVNTAAASGEKTPWVPDPVTGYYRPAGGAKEVDAAELRARLLTKRIAN

SEQ ID NO: 72677 - protein, 363 aa, Zea mays; identical to SEQ ID NO: 42242
  Clone ID: LIB3632-015-F6_FLI.pep

SEQ ID NO: 72678 - protein, 448 aa, Zea mays
  Clone ID: LIB3594-023-C6_FLI.pep
ASSRRGQEVEKGRMKSGGGDGEGKSKEDRGHGPEKHKVTLPTVSNYTIHDTEDTQNAKQDDTSNDQQGSKPLCDFSNFRANVCEMRGDVRVHPNAASIMFMEPGHSQRDELWKIKPYPRKGDEFCLSHITELTVKSSKVAPECSKYHDVPAVIFSLTGYTGNLFHDFTDVMVPLFTTASEFNGEVQFLITDMALWWTIKYHTVLEKLSKYPVIDFSKDGEVHCFKHVIVGLHAYMEFTIDSSKAPHNYSMVDFNRFMRGAYSLGRDSVTVLGEYPKVKPRLLIIKRHRTRMFLNLDEIIAMAEELGFEVVIDEANVSSDISKFAALVNTVDVMMGVHGAGLTNCVFLPQNATLIQIVPWGGLEWVSRTDFGNPAELMGLHYKQYSIGVHESSLTEQYPSDHEIFKNPISFHKKGFDFIRQTFMDKQNVKLDCKRFRPILLEALDNLNA

SEQ ID NO: 72679 - protein, 155 aa, Zea mays
  Clone ID: LIB3607-061-D3_FLI.pep
AAAGHTEVLGPAVRGSTFTLTTGAQTQQPPIISQPSHHQESSGGARAAGKTKGIDPSVGRPIMILGLGGCCGAAAAAAAVSPDAVGKQLGGHLEASERQQKKRGPSDEQKMNKGGEQGAAVAAGGGKERSKTKDHHKAPPIVVHQFPFHSRPGLL

SEQ ID NO: 72680 - protein, 1089 aa, Zea mays
  Clone ID: LIB3689-221-C10_FLI.pep
TVIGSSAVDATLPDVGPLGPDDEGIDPDPEQGEDGGQQHGPDDDNGGRPVLAPHEPLEERVEVDDDPEGEEELAEERAPRLVPVVDGVGDAGHDADDVDDEQRGGRDEERGPLERVELGELVVHVAGGLGGDGEVGVDPGQDLEQALHDGEEVRGHAADDPELLVPPPLLDAHPAPPHLQDARREDGHEEGDEEEAGERADRRHDELAGEEADGWQGTVGEQRERGEGVDGGVDVGEALQPLEVAVLVAVQQGAVPAEEDLDGPQRPPEHLVETVGQVDRRRPLERRPLRHAVHRAPPAAVHLEPRQDVLRDGPVDPPQLQAPVGLVLVAAADDVDGLLEERSWARRRRDAAFLHERGRDERRGLPEPLLEVHLGHEHLLVAVHDIRGALRQPILGVLPLLAAEARAAVAGHHLWPLGALGRVVAVERLAPEHAPCPDVDRALDAVQPLHVDVEEDGVPVRVSVVHVDAVEPLRELHVADLPADLRVHEEAHGLPDGLAVVDVVITVQVEHEGRVGQHGGDADQSVHGAGLLVVLEARALLTGDVHEAGQLVALGVVAAAVAQEHLDHARVVAGVVPGPRRAVLHDPPLCRHLHGLGHQRVDADLELLVLSLHGAALLHEGGLHLVLEVIDLEREVELRGAGLDAELLAERHPLPRELGRLRQRLEREHRRAVVGDVAGDLVHGVVHGEDGEHGVGGDQRRLLERVHRADEQVHRRQQRRLPFPFVPEGEAVQVRLAVDGEPLGELVQDPGHGEPDLADDGDEPQPDGVRDRVQDAVAEEEGEDDETHHDDHPVRVHLARRDRHLARQRLPRLVVQRHVGVHVFGVAAAAAAEDALLGLPVVHPLLPAHFFLLVPLGAPWLRHRVGMDALVQGRRELAVAIPVCDWKLTAHRHGAGAGDDGRHLRGVVALAVVGPPPVAHLAVQHGLGDLAVLHVALQLPLLLVVDVELVLQVVDVLLVIVPGDPRAPLEALVARLALGAVLRALPALVLVAGPADGETALVAGHEEVAVHREPDLVAAYLAHLPAQRPQRLGVLVAPDEHQLVPVVRAGHKPGAGLHRARHRRAEAGVLASSWPPIDRSRWQGRATLV

SEQ ID NO: 72681 - protein, 239 aa, Zea mays
  Clone ID: LIB3900-007-F12_FLI.pep
CFERAEDGHAVYHVHTVGSRELRCVGEPPAPWASGDMVMAMPMMVYLHPHVVADSRIYWQPVKLPVGNGKVNNMLVFDTMTESFQQLLSPVEGPFLELFQMNSGALGLYHCRSGKVDLWVLQDHGSWSWSMNHRIKLDVMFFSLLPVLDPEGDVLVLSKRGETGILWQHLHHISGVNGSLLALYQWSAYLKLSRHRLKESLVHHDFFSMEGNEGGVDEKPLFDGLSTVALLRDDNSEPH

SEQ ID NO: 72682 - protein, 949 aa, Zea mays
  Clone ID: LIB3689-253-A3_FLI.pep
QRLILGTNLVISTMECNREEALKAREIAVKKLESRDFVGAKRIALKAQRIFPEIENIPQLLTVCEVHCAAEAKVNGMLDFYGILQVEGTADEVTIKKQYRKLVLSLHPDKNSYAGAESAFKFVAEAYSTLSDRTKRYAYDVKWRAAPKVAPKQATQPTQPNQATQQKQDAKPKHVAKPKQAAQPKQATQPMWTTEPINKNSTNSSAAGYGPWTFWTVCIHCKTKYKYHGDILNRQIRCQNCRQNFFAHQTSTEDVPSAFSSKTANSAAQQGCSTNIFSRENKEGPVMEGVKFSAKNSTVPDFGDRKNLGGGVDTSAGPGSAEIPTPRRSSRRKACADANNILNSPKKKSRTLKDWFSNATSSSNKVVDDNVAHADGHVSEPHVSSKTDNQDSCVVNEGNKRNTKTTCDPPAEKPWNTGSFTYPDPEFFDFDKCRDVKLFAVDQIWALYDEFDAMPRFYARIRHVNTTNFRVKYTWLEHSTVNDDEEKWIDNKLPVACGNFTLGNTEESQDPLMFSHMVSWVKGRKRGSYVIYPNIGEVWALYKGWSMQWVSDADSHRSYEYEVVEVLSNFTVEAGVTVIPLVKVKGFVSLFAPAKDKPSFVIPSSELLRFSHSIPFFRTVGNEKVGVPCGFLELDTVSLPSNLDVAFPPVDLDSCVATNRTMGSESVDLTDNTTPSHGNGRSAHKGNHRNAGKWRKQSVQTQQHNARLASMSGYSAPQVCASTSVFTYPDSLFYNFEEDRSYNKFERGQIWALYSDFDGLPKYYGWVTKVDSDPFGVHLTWLEACPRSEHENTWLEHDLPVSCGTFKLHNWRMKYDINDAFSHVVETQGGSKRNFEIHPEVGEIWAIYHNWSPGWVPSKDTCEYAIGEITERNEASTKVLFLTQVDGYKTVFKPDNERSILEVPTKDDLLFSHRIPSFQLTTEKGGELCGFYELDPAAIPDSFLSAGTH

SEQ ID NO: 72683 - protein, 112 aa, Zea mays
  Clone ID: LIB4185-037-F7_FLI.pep
LPPAGLQGGAPSSLAAVAGVALAVAAALAPAVLSSGGRLEPALGVPLGWCDTHDESLGGGGHLLSHVRVHLAAPSAAVAALAAGAAPTVASAARHPLSLDLANKNTDELNER

SEQ ID NO: 72684 - protein, 758 aa, Zea mays
  Clone ID: LIB3689-229-F3_FLI.pep
PTKNALPNPTLLLLALGGVSASAVRTRARFPSLPRPRGRGHGRSKLAAEREQPIWRTSLTLPPSVQQRSFRCSLRSSHSGERVGAAMPTPPLRGAGLLLRICLFLCLSLRPRLASSEPDADKAALLAFLSGVGRGATARARINWSTTHLACSADGPGPGWTGVTCSADGARVVALHLPGLGLSGAVPPGTLGRLTALQLLSLRSNDLSGPLPADLLRLPALEGLHLHRNAFSGALPAALAGLTALQVLDLSFNAFDGAVPGALANLTRLVALDLSNNSLSGRVPDLGLPALRFLNLSNNRLDGTVPASLLRFPDAAFAGNSLTRPAPAQAPPVVVAPPPGLAAPPPARRRPRLSEAAILAIAVGGCVLGFAVAALLLLAFCNSSREGRDEETVGGGAAAGKGGEKKGRESPESKAVIGKAGDGNRMVFFEAPSLAFDLEDLLRASAEVLGKGAFGTAYRAVLEDATTVVVKRLKEVNAGRRDFEQQMELLGRIRHDNVVELRAYYYSKDEKLLVYDYYSRGSVSNMLHGKRGEDRTPLDWETRLKIALGAARGVAHIHTENNGRFVHGNIKASNVFINKHERGCVSDHGLASLMNPVTVRSRSLGYCAPEVADTRKASQSSDVYSFGVFVLELLTGKSPVQITGGNGGDVVHLVRWVQSVVREEWTAEVFDGELLRYPNIEEEMVEMLQVAMACVSRSPERRPRMADVVRTIEEVRRSGSGTATGTGTRPSTEASTPATAAEAAQSRAEEGGSSAVAQ

SEQ ID NO: 72685 - protein, 388 aa, Zea mays
  Clone ID: LIB4606-003-C11_FLI.pep
RRLYWFSRVGVDGRVLLGKMVMGAASVGTLLVALAVLAPAVMAQSCDDELPAQLAGNFSGLACAPVWNNFVLRYAQDKDNVLRVVLSTMYSTGWVGMGFSKNGLMVDSSAMVGWIGKTGLPHIKPFSLGGKTPSQVVADQGFLVSSDNHKPTVLVQQAKIYLAFQLSFTEPLRRQNVLLAVGSAIPVNDRLAEHQDKTSIVFDFTTGSSSGSSSFPEGLKRTHGALNLFAWGVLLPIGAIVARYCRRWDPLWFYLHAGIQFVGFILGLAGVVAGVSLYSKIQADVPAHRGLGIFVLVLAILQILAIFLRPNKDSKYRKFWNWYHHWVGRLALFFAAINIVLGIKVGGAGNSWKIGYGFNLAVLLITIVTLEVLLWTRWKNSTGSTGAY

SEQ ID NO: 72686 - protein, 523 aa, Zea mays
  Clone ID: LIB3689-246-H11_FLI.pep
RYAWKGPAGRKIVFSPSCWCCLLVAECFGAAVEVAPRRRHWRWWQSWIDYLIQDLTGATSNGSHHHEFGSKTPRRPGAIDNTDLIDDVPLEVSNMEIEIHDNLVEGRDYILLPQQVWEKLHGWYGGGPTLPRKAINTGFSQTDLAIEVYPLRLQLILMSRGERTFIRISKKGTVGQLHKMACKVFDLAPDEVCIWDYYGRTKHSLMDSLDKTLDDANIQMDQNILVEVTTDASGSRDGLVKRNNFFESDAPKSGLPDENFAANNYASRSYSSSLTPSIYLRSPNGDLDNVHGSSGMITRGSPLGLTGLLNLGNTCYMNSAIQCLVHTPQFTKYFCEDYHREINRQNPLGNVGELALAFGELLRKLWAPGGRAPVSPRPFKMKLSRFASQFSGYNQHDSQELLAFLLDGLHEDLNRVKHRPYINSGDADGRSDEEVADEYWANHIARNNSIIVDVCQGQYKSTLVCPVCGKVSVTFDPFMYLSLPLQFASTRSVTAVVFSCDGSVPPTPFTVNVPKQGLTIVCP

SEQ ID NO: 72687 - protein, 469 aa, Zea mays
  Clone ID: LIB4704-005-E4_FLI.pep
FTRLELALPPFPDRASVMEIDEMESGVVNGSGGGGGGSFRRARCWELLCSAAGKVVGFARKLGRIARDDPRRVAHSIKVGLALTLVSVLYYVRPLFNNWGVSTMWAVLTVVVVMEYTVGGTLSKGLNRACGTLAAGFIAVGAHKVAYLCGDKAEPVLLAVFVFLLSSAATFSRFIPEVKARYDYGVTIFILTFSLVAVSSYRVDELIRLAHQRFSTIVVGVGTCLCTTVFVFPVWAGEDLHRLAIGNLNKLAEFFEGLESECFRENATFENLEAKPFLQVYKSVLNSKATEDSLCNFAKWEPCHGKFKFRHPWSQYQKLGALSRQCASSMEALASYVITLTRTEYPEARPELRSEVRTACRQMSLHSAKALRELSAAMRTMAVPPSPANAHMSAAAKAAKDLRVELEDADLAQAMHVAVVASLLSDLVTKAKQITESVGTLARLARFVKNNNHENNADDKDIAAIDAVS

SEQ ID NO: 72688 - protein, 55 aa, Zea mays
  Clone ID: LIB4726-014-F9_FLI.pep
LLLKYRNHANFHKMQCRYSRYNMHIHAFVSKFHIHFFSTCTSICHPSLWWWSRTL

SEQ ID NO: 72689 - protein, 199 aa, Zea mays
  Clone ID: 700208888_FLI.pep
PLLAGPRARACLLNRSARIPFLPRCSSTTGRASPSLSALAYSPDVPLLWPCLVVFMDMDSIDIFIVARHCDLPTPCHTRPPPRLTPAAEQQHARHSLISLTVVFNNVETLLYSTCVACSSECVTGLLDLAVGCFASATVYPTSIVTLLFSPGGSLPTPLPGESSYSLPTWCGMESFNCSLSSFLVLGPVSFALSSCSLW

SEQ ID NO: 72690 - protein, 492 aa, Glycine max
  Clone ID: LIB3242-510-A7_FLI.pep
PDRKLFSGIAGIIVAITCCSAVVKLGARRICCPLFVLSLEDALVKLMDFSLNLAPVDKLHWLATEAGFELNFLSHFGGKVFPSEKTEDLEFWIGLAHKKLLKAFCKESITSKKQNFQQKIQADNLATLGLFTYLGKRTRIFLSAMGIKDLDGVVKNFLSYLECGILFIYPEFSSIRVYQCFMEVVTDEIGWLDFYGSYVQINCKEKRSKHNARQAEKEIISSVVFTVCYDVFSGFAHFNRTTQQSLDTASRSYLLRCQGLLSICLQYHWAAYDNSGESLNTVDHASFDNHTSYMGSINGPKLPLVFEVQQMSHDLTTEGCPKSDFRNSSIFKKAPISAIANKKTYEEDTCVNKSNPQHESFIKRYSIKLASTSADLWMGTVLLFIDIMVALELLVRQVHGCKASESQRKKLHRTMTDIIVLIPVTILMLIPVTAVGHAAILAAIKKYMPFLIPSSFSSERLDVVKLIKQTRKMGYQLHSAQFDLEDQPATIS

SEQ ID NO: 72691 - protein, 201 aa, Zea mays
  Clone ID: LIB3957-013-A9_FLI.pep
AHYLPANPSRKKLFPTHPRLAAVATPTRSPNSPAVMASLWRAVMDSVSGSSPSALDAAPGSGVEFWHGAERAGWLNKQGEYIKTWRRRWFVLKQGRLFWFKDPAVTRASVPRGVIPVATCLTVKGAEDVLNRQFAFELSTPAETMYFIADSEKDKEEWINSIGRSIVQHSRSVTDAEVVDYDSRPQPPPQLMTSEESAPAA

SEQ ID NO: 72692 - protein, 146 aa, Homo sapiens
  Clone ID: LIB4119-235-B11_FLI.pep
IVLQQTWAYSMLHDDPSRRIPAEMALCSPFFSIPFPPHIEDLVMLPTPVLRLLNVLDDDYLENEEEYEDVVEDVKEECQKYGPVVSLLVPKENPGRGQVFVEYANAGDSKAAQKLLTGRMFDGKFVVATFYPLSAYKRGYLYQTLL

SEQ ID NO: 72693 - protein, 199 aa, Zea mays
  Clone ID: LIB4071-005-F8_FLI.pep
SYRGDRDSTAAYVAAATAFKGHMPPRRQWFKEVARAVRSSVVLLSRPLRLVDAVLCCILDVAGLVHPGEHGQRSDAEAAGGDEPGRHERQRDGGRHQHRAEDHQHGGGHRERDHGAGQDQPGQHQHRPAEGRGRRGLERRHHGALLLLLLRLAVHAAPALEVAVAPATSRRAPVVISHGRLAERARYPTCARCPELLPL

SEQ ID NO: 72694 - protein, 212 aa, Zea mays subsp. mexicana
  Clone ID: UC-ZMROTEOSINTE022H05_FLI.pep
LKYSTLAITPAKVAAATVAEEKLTIHKTNPTHMSLQWHQINNNPRTPCFLSRCLRWRLGPLTADPPCQLNVLWHDGHTLSMDGAQVGVLKQTNKVCLSSLLEGKHRMALETQISLEVLCNFPDEPLEGQLPDQQLSALLVLADLTEGNSSRAVAVRLLHSTSGGGRLTGSLGGKLLPGSLPSRGLASSLLGTSHLSCFFGLSTRFVSGGRGA

SEQ ID NO: 72695 - protein, 86 aa, Zea mays
  Clone ID: LIB4726-010-B11_FLI.pep
HLPVLCKAHKDLPSGTSVFWNEDAQRSCYEVPIQCSLSSMSVLTLAMHLLCHPSPIACAIQSVSNHSSQKLHLVVVFLRLIIFCAS

SEQ ID NO: 72696 - protein, 572 aa, Zea mays; identical to SEQ ID NO: 64277
  Clone ID: LIB4171-031-B11_FLI.pep

SEQ ID NO: 72697 - protein, 87 aa, Zea mays
  Clone ID: LIB3912-038-C6_FLI.pep
SRTALQVEEVCCHSLPRPSSNIQFNTFHSLSYTKRVMSCVVTTTYHLLLCENYVICMYYTILYHLIYLCILLLLVRDKCRKQTTEKN

SEQ ID NO: 72698 - protein, 207 aa, Glycine max
  Clone ID: LIB3093-035-F1_FLI.pep
LGLFDSEVEAARAYDKAAIKCNGREAVTNFEPSTYEGELKSAAINEGGSQNLDLNLGIATPGPPKENWGQLQFPSFPYNTHGGRSSMMETNVSSGIGNPSLKRMVATEDRPSLWNGMSPNFFPNGERAERIGVDPSNGLPNWAWQTHGQVNATPVPTFSAAASSGFSISATFPSAAIFPTSSMNSIPQSLCFTSSSMPTRNASEYYY

SEQ ID NO: 72699 - protein, 132 aa, Glycine max
  Clone ID: LIB3093-032-A3_FLI.pep
FLQVDDVTLLVDHHNDMRLDIEDMSYEELLALGERIGKVNTGLSEEMITSQMKTKSYLLLATNAINLEEAASEEQETDSCIICQDEYKNQEKIGILQCGHEYHADCLKKWLLVKNVCPVCKSEALTPGEKCV

SEQ ID NO: 72700 - protein, 795 aa, Homo sapiens
  Clone ID: LIB4803-019-E6_FLI.pep
PERLFADALGAAAMASTRSIELEHFEERDKRPRPGSRRGAPSSSGGSSSSGPKGNGLIPSPAHSAHCSFYRTRTLQALSSEKKAKKARFYRNGDRYFKGLVFAISSDRFRSFDALLIELTRSLSDNVNLPQGVRTIYTIDGSRKVTSLDELLEGESYVCASNEPFRKVDYTKNINPNWSVNIKGGTSRALAAASSVKSEVKESKDFIKPKLVTVIRSGVKPRKAVRILLNKKTAHSFEQVLTDITEAIKLDSGVVKRLCTLDGKQVTCLQDFFGDDDVFIACGPEKFRYAQDDFVLDHSECRVLKSSYSRSSAVKYSGSKSPGPSRRSKSPASVKRGGHYSSAYSTAKSPVNGTPSSQLSTPKSTKSSSSSPTSPGSFRGLKISAHGRSSSNVNGGPELDRCISPEGVNGNRCSESSTLLEKYKIGKVIGDGNFAVVKECIDRSTGKEFALKIIDKAKCCGKEHLIENEVSILRRVKHPNIIMLVEEMETATELFLVMELVKGGDLFDAITSSTKYTERDGSAMVYNLANALRYLHGLSIVHRDIKPENLLVCEYPDGTKSLKLGDFGLATVVEGPLYTVCGTPTYVAPEIIAETGYGLKVDIWAAGVITYILLCGFPPFRSENNLQEDLFDQILAGKLEFPAPYWDNITDSAKELISQMLQVNVEARCTAGQILSHPWVSDDASQENNMQAEVTGKLKQHFNNALPKQNSTTTGVSVIMNTALDKEGQIFCSKHCQDSGRPGMEPISPVPPSVEEIPVPGEAVPAPTPPESPTPHCPPAAPGGERAGTWRRHRD

SEQ ID NO: 72701 - protein, 278 aa, Zea mays
  Clone ID: LIB4300-015-D9_FLI.pep
QHRKHNSVPTMAAKIFCLLMLLGLSASAATATIFPQYPQAPIASLLPPYLSPAVSSVCENPILQPYRIQQAIAAGTLPLSPLFLQQSSALLQQLPLVHLLAQNIRAQQLQQLVLANLAAYSQQQQFLPFNQLGSLNSASYLQQQQLPFSQLPAAYPQQFLPFNQLAALNSPAYLQQQQLLPFSQLPAAYPQQFLPFNQLAALNSPAYLQQQQLLPFSQLAGVSPATFLIQPQLLPFYQHAAPNAGTLLQLQQLLPFNQLALTNPAAFYQQPIIGGALF

SEQ ID NO: 72702 - protein, 395 aa, Glycine max; identical to SEQ ID NO: 38715
  Clone ID: 700754423_FLI.pep

SEQ ID NO: 72703 - protein, 259 aa, Arabidopsis thaliana columbia
  Clone ID: JC-ATXLIB327414P4C07_FLI.pep
KKNQISLFLSLMAATLGRDQYVYMAKLAEQAERYEEMVQFMEQLVTGATPAEELTVEERNLLSVAYKNVIGSLRAAWRIVSSIEQKEESRKNDEHVSLVKDYRSKVESELSSVCSGILKLLDSHLIPSAGASESKVFYLKMKGDYHRYMAEFKSGDERKTAAEDTMLAYKAAQDIAAADMAPTHPIRLGLALNFSVFYYEILNSSDKACNMAKQAFEEAIAELDTLGEESYKDSTLIMQLLRDNLTLWTSDMQEQMDEA

SEQ ID NO: 72704 - protein, 342 aa, Glycine max
  Clone ID: 700757965_FLI.pep
NNEDTPVVAVSIIDTNSLENQLDQMPRRFYLAGNQEQEFLKYQQEQGGHQSQKGKHQQEEENEGGSILSGFTLEFLEHAFSVDKQIAKNLQGENEGEDKGAIVTVKGGLSVIKPPTDEQQQRPQEEEEEEEDEKPQCKGKDKHCQRPRGSQSKSRRNGIDETICTMRLRHNIGQTSSPDIYNPQAGSVTTATSLDFPALSWLRLSAEFGSLRKNAMFVPHYNLNANSIIYALNGRALIQVVNCNGERVFDGELQEGRVLIVPQNFVVAARSQSDNFEYVSFKTNDTPMIGTLAGANSLLNALPEEVIQHTFNLKSQQARQIKNNNPFKFLVPPQESQKRAVA

SEQ ID NO: 72705 - protein, 133 aa, Zea mays
  Clone ID: 700105172_FLI.pep
TFTKVYKRGAVGRSIDISQFSGYDELKHALARMFSMEGQLEERQRIGWKLVYKDHEDDILLLGDDPWEEFVNCVKCIRILSPQEVQQISLDGDLGNNILPNQACSSSDGGNAWRARCDQNSGNPSTGSYDQFE

SEQ ID NO: 72706 - protein, 199 aa, Glycine max
  Clone ID: 700899263_FLI.pep
KYQNFETKTSHAKRSPAHAQDHIMAERKRREKLSQSFIALAALVPGLKKMDKASVLGDAIEYVKELKERLTVLEEQSKKTRAESIVVLNKPDLSGDNDSSSCDESIDADSVSDSLFEVESRVSGKEMLLKIHCQKQRGLLVKLLAEIQSNHLFVANSSVLPFGNSILDITIVAQMGESYNLTTKELAKNLRVAALKILS

SEQ ID NO: 72707 - protein, 537 aa, Glycine max; identical to SEQ ID NO: 46285
  Clone ID: 701213972_FLI.pep

SEQ ID NO: 72708 - protein, 462 aa, Glycine max
  Clone ID: LIB3139-099-E9_FLI.pep
IFDVPKTMSNLTSASGEASASSGNRTEIGTDYSQQYFAPPLSQAQPPPLKKKRNLPGNPDPEAEVVALSPKTLLATNRFICEICNKGFQRDQNLQLHRRGHNLPWKLKQRSSNEIIRKKVYVCPEASCVHHDPSRALGDLTGIKKHFCRKHGEKKWKCDKCSKKYAVQSDWKAHSKTCGTREYRCDCGTLFSRRDSFITHRAFCDALAEESSRSVTGIGIVANSTSTQPTAAAASHQQDIIHGNSNNFSLKKEQQAGFRPPWIGQPSPSSASSFLVSHQENPNPRGGGPGPTLLPPYQTAPHMSATALLQKASQMGATMSKTGSMIGTHQQQAHVSANAALNLSSRDHQMTPTLHGLVPFGNKAVPAVGNGVSPSLLHHIIDSFSSPFEGTSFEDTFGGAGGDAMTKTTTADDGARGNNNEALTRDFLGLRPLSHTDILNIAGMGSCINSSQHNQTPNPWQG

SEQ ID NO: 72709 - protein, 1044 aa, Glycine max
  Clone ID: 701011201_FLI.pep
ETDEVYAQMTLQPVNKYEKEAILASDMGLKQNRQPTEFFCKTLTASDTSTHGGFSVPRRAAEKIFPPLDYSMQPPAQELVAKDLHDNTWAFRHIYRGQPKRHLLTTGWSVFVSTKRLFAGDSVLFIRDEKQHLLLGIRRANRQQPALSSSVISSDSMHIGILAAAAHAAANNSPFTIFYNPRASPSEFVVPLAKYNKVTYTQVSLGMRFRMMFETEESGVRRYMGTITGINDLDPVRWKSSQWRNIQVGWDESTAGERPSRVSIWEIEPVVTPFYICPPPFFRPKFPRQPGMPDDESDMENAFKRAVPWLGDDFGMKDASSSIFPGFSLVQWMSMQQNNQLTAAQSGCFPSMLPFNTLQGNLSTDDPSKLLSFQAPVLSTPSLQLNKPNLPNQINQLQQSPVSWPQQQQLQQQQQLQQQQQQQQQQQQQLQQQQQQQLQSLLQVPMNHLQQQREQQLPEPQNLPLWQQLPQQLGQQPQKQQSSQHATIMNNGVVASNQITNQFSQQPMAYGQLQQQQLLSGGIQSATKNTLPLTSLPQDSQFQQQIDQQASLLQRQQQQQQTQLQQSPLQLLQQNLPQRAPQQPPATQMLQQNPSEQQLHLQLLQKLQQQQQHQQRLLSTSTPLLLSQLLQQQNTHQQNQQLPQPLPPISQHQPQQLGNNAFSTEKLLNSNNLSSSLMQSQKLSMNHPQNTQKSLTITRAPSTLTEGDAPSCSTSPSTNNCQVTPPNLLKRNQQLPATLRGSLIVEPTSNLIQELHSKPDTQIKQEFLNVKGPDQLKYKGTITDQLEASSGTSYCLDPPGNVQQNLPLSNFCMEGDVQSHPRNSLPFDSNLDGLTPDTMLLTGYDSQKDLQNLLSNYGGAPREIETELSTADISSQSFGVPNMPFKPGCSSDVGINDTGVLNNNNGLRANQTPRMRTYTKVQKRGSVGRCIDVTRYKGYDELRHDLARMFGIEGQLEDPLRTDWKLVYVDHENDILLVGDDPWDEFVSCVQSIKILSSAEVQQMSLDGDLGGNVPIPNQAYSGTDSGNAWRGQYEDNSAASFNR

SEQ ID NO: 72710 - protein, 74 aa, Zea mays
  Clone ID: 701177958_FLI.pep
GDPLKTEHYSMPLCNCKPCNKGHMLEIPKYHVGISTRMAVETEAILVPALKIQLGFLMLFHRERKKKQSEGKVQ

SEQ ID NO: 72711 - protein, 148 aa, Zea mays
  Clone ID: LIB4700-002-D5_FLI.pep
PTKLVTCQYFETHRSMQLFSPILSSASLYLFSTHFSKQVFVSLLKRSTLYSISFSAIPNICSFSRLVGPPFPAIVAPLLQRTDRTNRIETQRKHVRSGAEKQHGKQDLTGEETEDRAGGAEIRRRDEQEQPRLRTTRQTLAGVLCSLF

SEQ ID NO: 72712 - protein, 1198 aa, Homo sapiens
  Clone ID: LIB4750-126-A8_FLI.pep
FHRRRAASEARAGHERAERRRRLRAGAAAALPRKGRTRRRPGGPPGGGGCAMDEPPFSEAALEQALGEPCDLDAALLTDIEDMLQLINNQDSDFPGLFDPPYAGSGAGGTDPASPDTSSPGSLSPPPATLSSSLEAFLSGPQAAPSPLSPPQPAPTPLKMYPSMPAFSPGPGIKEESVPLSILQTPTPQPLPGALLPQSFPAPAPPQFSSTPVLGYPSPPGGFSTGSPPGNTQQPLPGLPLASPPGVPPVSLHTQVQSVVPQQLLTVTAAPTAAPVTTTVTSQIQQVPVLLQPHFIKADSLLLTAMKTDGATVKAAGLSPLVSGTTVQTGPLPTLVSGGTILATVPLVVDAEKLPINRLAAGSKAPASAQSRGEKRTAHNAIEKRYRSSINDKIIELKDLVVGTEAKLNKSAVLRKAIDYIRFLQHSNQKLKQENLSLRTAVHKSKSLKDLVSACGSGGNTDVLMEGVKTEVEDTLTPPPSDAGSPFQSSPLSLGSRGSGSGGSGSDSEPDSPVFEDSKAKPEQRPSLHSRGMLDRSRLALCTLVFLCLSCNPLASLLGARGLPSPSDTTSVYHSPGRNVLGTESRDGPGWAQWLLPPVVWLLNGLLVLVSLVLLFVYGEPVTRPHSGPAVYFWRHRKQADLDLARGDFAQAAQQLWLALRALGRPLPTSHLDLACSLLWNLIRHLLQRLWVGRWLAGRAGGLQQDCALRVDASASARDAALVYHKLHQLHTMGKHTGGHLTATNLALSALNLAECAGDAVSVATLAEIYVAAALRVKTSLPRALHFLTRFFLSSARQACLAQSGSVPPAMQWLCHPVGHRFFVDGDWSVLSTPWESLYSLAGNPVDPLAQVTQLFREHLLERALNCVTQPNPSPGSADGDKEFSDALGYLQLLNSCSDAAGAPAYSFSISSSMATTTGVDPVAKWWASLTAVVIHWLRRDEEAAERLCPLVEHLPRVLQESERPLPRAALHSFKAARALLGCAKAESGPASLTICEKASGYLQDSLATTPASSSIDKAVQLFLCDLLLVVRTSLWRQQQPPAPAPAAQGTSSRPQASALELRGFQRDLSSLRRLAQSFRPAMRRVFLHEATARLMAGASPTRTHQLLDRSLRRRAGPGGKGGAVAELEPRPTRREHAEALLLASCYLPPGFLSAPGQRVGMLAEAARTLEKLGDRRLLHDCQQMLMRLGGGTTVTSS

SEQ ID NO: 72713 - protein, 354 aa, Zea mays
  Clone ID: LIB4702-004-A11_FLI.pep
PPPPMDIEADGRFGNKRVHNRLGPGSGGAPPSTNGKVCNYWRAGRCNRFPCPFLHSELPEAAPPKRPTGPGGNVWRNPNTGGRGGGHHNRWGKGPGGGSGIASHKPPERPCKYFLAGTECSYGERCRYPHSYCISDSIAMLTLLKGHEQGVTGIALPAGSDKLYSGSKDGTVRMWDCQTGQCAGVITMGREVGCMIIEGPWLFVGIPDAVKVWNMQTAAEMSLTGPTGQVYALAVASELLFAATQAGRILAWRFSAATNCFEPAASLDGHKLAVVSLIVGGMRLYSASMDKTIRVWDLATLQCIQTLSDHTDVVMSVLCWDQFLLSCSLDQTIKVSRHLHHHFVEFGPLQRVET

SEQ ID NO: 72714 - protein, 199 aa, Zea mays
  Clone ID: LIB3067-028-B2_FLI.pep
VLFMSSWPLFSNSTEARYFAAVVPFLNSMRLLIYGLRLYTDEALVKSVTREGKPEELLRGPLYYVLVLLFSVLVFWRESPIGIVSLSMMSGGDGFADIVGRRYGSAKLPFNRKKSWAGSISMFISGFLLSAMMMLYFSSLGYIDVIWEEALGKLALVALAATVVECVPVTEVVDDNISVPLATMLVAFLLFSSNRTIVN

SEQ ID NO: 72715 - protein, 734 aa, Zea mays
  Clone ID: LIB4717-003-A4_FLI.pep
HSDWPSRIYLQIFLSAKSDALLARAMEESFVPLRGIKDDLHGRLACYKQDWTGGFRAGIRILAPTTYIFFASAIPVISFGEQLERNTDGVLTAVQTLASTALCGIIHSIVGGQPLLILGVAEPTVLMYTFMFNFAKDRPDLGRNLFLAWTGWVCVWTAILLFLLAILGACSIINRFTRIAGELFGLLIAMLFMQQAIKGLVDEFRVPERENTKALEFVPSWRFANGMFAIVLSFGLLLTALRSRKARSWRYGTGWLRGFIADYGVPLMVLVWTGVSYIPYGNVPKGIPRRLFSPNPWSPGAYDNWTVVKDMTQVPLLYILGAFIPATMIAVLYYFDHSVASQLAQQKEFNLRKPPSFHYDLLLLGFLTLVCGLIGIPPSNGVIPQSPMHTKSLATLKHQILRNRLVATARKGMSQNASLSQLYGSMQDAYQQMQTPLVYQQQSVRRGLNELKDSTVQLASSMGNIDAPVDETVFDIEKEIDDLLPIEVKEQRLSNLLQASMVVGCVAAMPLLKKIPTSVLWGYFAFMAIESLPGNQFWERILLLFTAPSRRYKVLEEYHTTFVETVPFKTIAMFTVFQTAYLLVCFGITWIPIAGVLFPLMIMLLVPVRQYILPKLFKGAHLTDLDAAEHEESPAIPFSLAAQDIDVALGRSQSAEILDDMVTRSRGEIKRLNSPKITSSGGTPVAELKGIRSPSISEKAYSPRLTELQHERSPLGGRSRPRTPSKLGEGSAPK

SEQ ID NO: 72716 - protein, 114 aa, Zea mays
  Clone ID: LIB3912-042-G4_FLI.pep
GVQRQAARRRARRRRQPHAGARLQHEAALRAAAGALGRHQDPRRHARGHQARRRRRREGPRRARRRRLRRAPEGGRGRARQAPRLPARDERLLVCAPLCSMAMGIVNWPMGNGN

SEQ ID NO: 72717 - protein, 117 aa, Zea mays
  Clone ID: LIB4726-014-F3_FLI.pep
ELKRRMGFEKQILRSGTGPKPIKGQKVTVHCTGYGKDRDLSKKFWSTKDPGQQPFSFSIGQGSVIKGWDEGVMTMQVGEVARIQCTPDYAYGAGRFPAWGIQPNSVLVFEIEVLSAQ

SEQ ID NO: 72718 - protein, 74 aa, Zea mays
  Clone ID: 700467204_FLI.pep
KIQFTTNFCKIKISPIWKARIEPKCRFFVWTMLYNIILTADNLQKRGWPCNPICCLCNLSQETMPHLGKDCPFL

SEQ ID NO: 72719 - protein, 394 aa, Zea mays
  Clone ID: LIB4730-075-G7_FLI.pep
FAPASIASDRSLSIPCSSRPPTHRRRSEVALAGAAAPTRASAQRDLPPSAHHRRLAGRPSQDRPQTRTTKRRAPQAASSSSSSPRRRKKSTRIHPREEMGSFKGHVLPGTLFLAVGLWRVWSSAARHAADPSSFRVRAWSPAPARGPARLLELYVVAGGALADMCVEVLYSTHLRIFAGGEVNPAHLNDLEHGGMLLMFFLFGALALASQLWPRHFPLTDGALCLVAATAFTAELVLFYFHSTTHMGLEGYYHYLLVLLVGLCVAAAVLGALLPESFPADLASGVLVALQGLWFYQTALALYGPMLPAGCARDADAHVECRSRAAQERAEQLAISQLFALVLLAFLYALGCYAVAAARYGRPPELPAVRHRRAAAVELECRQGDDAGAMEECAI

SEQ ID NO: 72720 - protein, 458 aa, Zea mays; identical to SEQ ID NO: 47466
  Clone ID: LIB3245-492-F6_FLI.pep

SEQ ID NO: 72721 - protein, 557 aa, Zea mays
  Clone ID: LIB4730-076-H4_FLI.pep
RAHFAHLPPPCAQPHTTNTFHQTPPPPPPPPPIPVPSRARPPHPSGPPRLPSPAAAGFISRSCLLRRRRPLPPLLILLRGSAKFRRMDIDASASVMCQLLSPEGDPLGSALYLPQNVGPPQLQEIVNQLLHNEEKMPYAFYVGDEELSVHLGAYMRQKNANVEVTLRIVCQPQALFRIRPVNRCSATIAGHTEAVIAVSFSPDGKSLASGSGDTIVRFWDLSTQTPLFTCKGHKNWVLCIAWSPDGKHLVSGSKSGELILWDPKTGNQLGTPLMGHRKWITAVSWEPVHLQSPCRRFVSASKDGDARIWDITTRKCVISLTGHTSSVTCVKWGGDGLIYTGSQDCLIKVWETSQGKLVKTLKGHGHWVNSLALSTEYVLRTGAYDHTGKTFSTAEEMKEAALARYKKMRGNAPERLVSGSDDFTMFLWEPTISKQPKARMTGHQKLVNHVYFSPDGQWLASASFDKSVKLWNGITGKFVAAFRGHVADVYQISWSADSRLLLSGSKDSTLKIWDIRTHKLKMDLPGHADEVYTVDWSPDGEKVASGGKDRVLKLWMN

SEQ ID NO: 72722 - protein, 515 aa, Zea mays
  Clone ID: LIB4603-003-C10_FLI.pep
HSHLKELHIAVKLCEQALVSVDPTISTLGTMQEAHVFRSPSGCAAFLANYNSNSHAKVVFNNEQYSLPPWSISILPDCKNVVFNSATVGVQTSQMQMWGDGATSMMWERYDEEVDSLAAAPLLTTTGLLEQLNVTRDSSDYLWYITSVDISPSENFLQGGGKPPSLSVQSAGHALHVFVNGQLQGSSYGTREDRRIKYNGNVNLRAGTNKIALLSVACGLPNVGVHYETWNTGVGGPVVLHGLDEGSRDLTWQTWSYQVGLKGEQMNLNSLEGSGSVEWMQGSLIAQNQQPLAWYRAYFETPSGDEPLALDMGSMGKGQVWINGQSIGRYWTAYADGDCKGCSYTGTFRAPKCQAGCGQPTQRWYHVPRSWLQPSRNLLVVLEELGGGDSSKIALAKRSVSSVCADVSEDHPNIKKWQIESYGEREQRRAKVHLRCAHGQSISAIRFASFGTPVGTCGNFQQGGCHSASSHAVLEKRCIGLQRCVVAISPDNFGGDPCPSVTKRVAVEAVCSPAA

SEQ ID NO: 72723 - protein, 260 aa, Zea mays
  Clone ID: LIB3592-053-F11_FLI.pep
VGRLRLLVVGGGELLVGVGDEEQLVDDAGEAAADEGPDPVHPLVAPLPADEGGAEGHGGVHGRAVEGAAHQDVGPHDEADGNGGDGAQAALLRVHRRGVHRVHQPEGHHDLQHQRLPHRHARQPEGARGLPARREAEQEARHGGPQQLRHPVQEPPEQGDVAAHEGAEGHGRVHVPAGDVRAHRHRHEQRERVRHRRRDQARRGRRAAAGQLACARGTQAGTSNSQILTTTVQKKTCSGFLFFPAFCFTAVIFLLSLLSL

SEQ ID NO: 72724 - protein, 283 aa, Zea mays
  Clone ID: LIB4730-077-B2_FLI.pep
REPMDSSSFVPAAGAENGSAAGGANNGRVAQQQAPAIREQDRLMPIANVIRIMRRVLPAHAKISDDAKETIQECVSEYISFITGEANERCQREQRKTITAEDVLWAMSRLGFDDYVEPLGAYLHRYREFEGDARGVGLVPGAAPSRGGDHHPHPHSMSPAAMLKSRGPVSGAAMLPHHHQHHHDMQMHGAMYGGTAVPPPAGPPHHGGFLMPHPQGSSHYLPYAYEPTYGGEHAMAAYYGGAAYAPGNGGSGDGSGSGGGGGSASHTPQGSGGLEHPHPFAYK

SEQ ID NO: 72725 - protein, 748 aa, Homo sapiens
  Clone ID: LIB4651-051-G5_FLI.pep
RPGVAVPLVLCGHLAKMPEETQTQDQPMEEEEVETFAFQAEIAQLMSLIINTFYSNKEIFLRELISNSSDALDKIRYESLTDPSKLDSGKELHINLIPNKQDRTLTIVDTGIGMTKADLINNLGTIAKSGTKAFMEALQAGADISMIGQFGVGFYSAYLVAEKVTVITKHNDDEQYAWESSAGGSFTVRTDTGEPMGRGTKVILHLKEDQTEYLEERRIKEIVKKHSQFIGYPITLFVEKERDKEVSDDEAEEKEDKEEEKEKEEKESEDKPEIEDVGSDEEEEKKDGDKKKKKKIKEKYIDQEELNKTKPIWTRNPDDITNEEYGEFYKSLTNDWEDHLAVKHFSVEGQLEFRALLFVPRRAPFDLFENRKKKNNIKLYVRRVFIMDNCEELIPEYLNFIRGVVDSEDLPLNISREMLQQSKILKVIRKNLVKKCLELFTELAEDKENYKKFYEQFSKNIKLGIHEDSQNRKKLSELLRYYTSASGDEMVSLKDYCTRMKENQKHIYYITGETKDQVANSAFVERLRKHGLEVIYMIEPIDEYCVQQLKEFEGKTLVSVTKEGLELPEDEEEKKKQEEKKTKFENLCKIMKDILEKKVEKVVVSNRLVTSPCCIVTSTYGWTANMERIMKAQALRDNSTMGYMAAKKHLEINPDHSIIETLRQKAEADKNDKSVKDLVILLYETALLSSGFSLEDPQTHANRIYRMIKLGLGIDEDDPTADDTSAAVTEEMPPLEGDDDTSRMEEVD

SEQ ID NO: 72726 - protein, 745 aa, Homo sapiens
  Clone ID: LIB4649-060-B1_FLI.pep
VAVPLVLCGHLAKMPEETQTQDQPMEEEEVETFAFQAEIAQLMSLIINTFYSNKEIFLRELISNSSDALDKIRYESLTDPSKLDSGKELHINLIPNKQDRTLTIVDTGIGMTKADLINNLGTIAKSGTKAFMEALQAGADISMIGQFGVGFYSAYLVAEKVTVITKHNDDEQYAWESSAGGSFTVRTDTGEPMGRGTKVILHLKEDQTEYLEERRIKEIVKKHSQFIGYPITLFVEKERDKEVSDDEAEEKEDKEEEKEKEEKESEDKPEIEDVGSDEEEEKKDGDKKKKKKIKEKYIDQEELNKTKPIWTRNPDDITNEEYGEFYKSLTNDWEDHLAVKHFSVEGQLEFRALLFVPRRAPFDLFENRKKKNNIKLYVRRVFIMDNCEELIPEYLNFIRGVVDSEDLPLNISREMLQQSKILKVIRKNLVKKCLELFTELAEDKENYKKFYEQFSKNIKLGIHEDSQNRKKLSELLRYYTSASGDEMVSLKDYCTRMKENQKHIYYITGETKDQVANSAFVERLRKHGLEVIYMIEPIDEYCVQQLKEFEGKTLVSVTKEGLELPEDEEEKKKQEEKKTKFENLCKIMKDILEKKVEKVVVSNRLVTSPCCIVTSTYGWTANMERIMKAQALRDNSTMGYMAAKKHLEINPDHSIIETLRQKAEADKNDKSVKDLVILLYETALLSSGFSLEDPQTHANRIYRMIKLGLGIDEDDPTADDTSAAVTEEMPPLEGDDDTSRMEEVD

SEQ ID NO: 72727 - protein, 87 aa, Zea mays; identical to SEQ ID NO: 46124
  Clone ID: LIB4732-002-F3_FLI.pep

SEQ ID NO: 72728 - protein, 575 aa, Zea mays
  Clone ID: LIB4746-019-E2_FLI.pep
TCGLRTGGRRLEHCFRVVRLIARIFCWRSSSWRRRERESARAGIGARKHPAAMAGGGVAALGVKTERAAQYKGRMTLAVATTCLVAAVGGAIFGYDIGISGGVTSMDPFLEKFFPVVFHRKNSGGKNNYCKYDNQGLAAFTSSLYLAGLVASLVASPVTRNYGRKASIVCGGVSFLIGAALNVAAVNLAMLILGRIMLGVGIGFGNQAVPLYLSEMAPAHLRGGLNMMFQLATTLGIFTANLINYGTQNIKPWGWRLSLGLAAVPALLMTLGGLFLPETPNSLIERGRVEEGRRVLERIRGTADVDAEFTDMVEASELANTVEHPFRNILQPRNRPQLVMAVCMPAFQILTGINSILFYAPVLFQSMGFGGNASLYSSVLTGAVLFSSTLISIGIVDRLGRRKLLISGGIQMIVCQVIVAVILGVKFGAEKQLARSYSVAVVVVICLFVLAFGWSWGPLGWTVPSEIFPLETRSAGQSITVAVNLLFTFAIAQAFLSLLCAFKFGIFLFFAGWITVMTVFVYVFLPETKGVPIEEMVLLWRKHWFWKKVMPDMPLEDGWGAAEGHAAPASNNHKG

SEQ ID NO: 72729 - protein, 657 aa, Chlorella sorokiniana
  Clone ID: LIB4918-005-F2_FLI.pep
SRHTDTYAGGSTTRNNSTCCRTGIWPVGTHDTHTHLPVVLILQFIGADRLCSHSACCRLQPGRSREVREHVLSSDRDRDCDVLAVDRAVRRAVAAAVGHRRLTAGVVDRGGVVGGDEAAGGVVGGLPLLHPLDGRGRAAGDARAPRHRLPRRVLREEPLEYHPVVVGLLVDGRVVGEHLGGVVHHLIRHLLFSEGFKAIDPVVANAVTELFFLPVENMLGQVRVLVVVERLPHDPLLDAAQVLVVHFPFGVHAHGDVDELLVEERHADLQAPRRRGLVGAQAVVLVQGLHLAAGLPVELLLVGGEVEVEVAAQELVGALPGQHHLHAQRLDLASHQEHGRAGPDRRHVVRLVVVDHLLDRVDAVLYGEVELVMDGSEVVSDLSCGLQVRGALEADDKGVELGAELLGGLGLDEVALGDGGDERGVEAAGEEDPERDVSHEPLDDRLLEGLSEDGRLVRRPGHLLLEPVRGVPPPEPAAGAGVEVARREDLEAHAVLVQRLHLGRDPDGTVTAPADVERVDADGVARRHVGPVAGVVEHEREHPVQHVHEVLAVLLVQGDDDLAVTARAEVVCAGELLPDVLVVVDLSIGHHHDGAVLVEQRLVAGQRGDDGEPLLHQEVALVLVEARPVGAPVLQPSGAGEDASPLCLRPVGATEHG

SEQ ID NO: 72730 - protein, 140 aa, Allium porrum
  Clone ID: LIB3803-022-H7_FLI.pep
SMLFRFWLVVCFSFLLVMWVIGASTDGLFSGLSTRPRSAPQVKRCSQRSELFQVTKASLPTCASFYRLYAIISSNYAYASMVMENCFSTLCYCVSVLVRSPGSNNVTSRVEALVLFTYAMSLHVNYLCCSLLGAQVCPLQ

SEQ ID NO: 72731 - protein, 608 aa, Zea mays; identical to SEQ ID NO: 59912
  Clone ID: LIB4748-018-D6_FLI.pep

SEQ ID NO: 72732 - protein, 532 aa, Zea mays
  Clone ID: LIB4748-009-D4_FLI.pep
GRHRQNAPSSKVPMAAFWLLLLFVASAVLVLRTWRAQSFVNKARQAGPRYPPGLEPYPLIGHLPQFLANRHRVLDWMTEALARQTTTCTFVLRRPGGVRGAITANPANVEHFLRTSFDHYPKGPRFASLLHDFLGRGIFNADGEAWRAQRKVASHEFNTRSLRAFVARCVHAELHGRLLPLLRRAAASGSPLDLQDVLERFAFDNICRVAFDHDPRQLPDDGDDTADSSFADAFRDAANLSAGRFRYAVPGFWKIKKALNLGSEKRLRESIAMVHDFADRIIQSRREEMLSAGFEKHDLLSRFMASQDETYSESKVPLRDVVISFLLAGRETTSSALTWFFWLLSSRPDVQRRIREEVAAVRARRAQDDVDSVVGFDLDEIREMRYVHAAITESMRLYPPVPVNSLLAETDDVLPDGTAVRAGWFVAYNSYGMGRMESVWGDDAREYRPERWLNPRDGTFRPDSPFRFVAFHAGPRLCLGKEMAYIQMKSIVACVLEELDVAVDGAYRPRQVASLTLRMADGLPVTVKQRRD

SEQ ID NO: 72733 - protein, 574 aa, Zea mays
  Clone ID: LIB4748-013-H8_FLI.pep
TDDSIPPATMPSRSDSDSLLVRAEGMRDAALDYHGRPADRGATGGWRSALFIIVVEIAERFTFYGVSANLINYLTGPLGEGTAAAAAAINAWNGVAQLLPLLGGALADKWLGRYRTIVIASLLYILGLGMLAFSTFLSSGSGHQCTAAGGQICAPSGLKVTFFYVSLYIVAVAQGGHKPCVQAFGADQFDQTDPKETVSRSSFFNWWYFGMCAGTAVTLVLLSYVQDNIGWGLGFGIPCAVMAAALAVFLLGTRTYRYYVTAGQGLFARAGEAFAEWRSRRKAGQLVQDSQELDPPAADAPRFSAGVDVEEQAAVSNNGGLIKEAKAILRLFPIWAACLLYAVAYSQSSTFFTKQAATLDRRIGRHVQVPPAALQSFISVTIVVIIPIYDRVLVPVSRRYSGKPSGITMLQRIGTGMFLSLLSMVIAALVEKHRLRVAGDAGLVDKPKVPVPMSLWWMVPQYVLFGAADVFTMVGLQEFFYDQVPDKLRSLGLALYLSIFGVGSFISSALVSVIDRVTTDRGGSWFSNNLNRGHVDYFYWLLAALSAVELLAYVFFAVTYKYKNRGAVHATVDG

SEQ ID NO: 72734 - protein, 410 aa, Zea mays
  Clone ID: LIB4748-016-F7_FLI.pep
HTPMPPPPPLARRLLLQPLPSGARALHTTPGVLACRLASRAVVRFAGPEAARFLHSLLTNDLLSAFSAAGASSPQRYAPTPNAPARGPAAPAYAALLTPQGRFLYDLFLYRPPPRSQMLDRTGSAPETGEAPEGHPHLQEVLADVDAAEVDDLVACFKRYRLRSKVEIDNVSENFACWQRFGHDVVHTEPSTQEPEAQSIGWGQGVDHAGESAAQGNDHGWQWLKDPRLDYLGYRGIFPADTIPPLVESDKEADERHYQLWRIENGVAEGSTEIPKGEAIPLEYNLAGLNAISFEKGCYIGQELIARTHHRGVIRKRLMPMKFVDGNGQELEQAVAPGSEVVDEASGKKVGAVSTALGSRGMGLLRLEEALKPGSALRAGGNRDVRVQAIRPDWWPAEWTQVLQEQRAAA

SEQ ID NO: 72735 - protein, 549 aa, Zea mays
  Clone ID: LIB4759-065-F5_FLI.pep
DSQIPISSSYLHFSLHTHPLLSLLCLKNSPGAISLAPSIPVASIASTSVSATVATTAPLPLPLLAQRQLPQPPQQAGMAALKASFRGELSAASFLDSSRGPLVQHKVDFTFQRKGKRAISLRRTCCSMQQAPPPAWPGRAVAEPGRRSWDGPKPISIVGSTGSIGTQTLDIVAENPDKFRVVALAAGSNVTLLADQVKTFKPKLVAVRNESLVDELKEALADCEEKPEIIPGEQGVIEVARHPDAVTVVTGIVGCAGLKPTVAAIEAGKDIALANKETLIAGGPFVLPLAHKHKVKILPADSEHSAIFQCIQGLSEGALRRIILTASGGAFRDWPVDRLKDVKVADALKHPNWNMGRKITVDSATLFNKGLEVIEAHYLFGAEYDDIEIVIHPQSIIHSMVETQDSSVLAQLGWPDMRLPILYTLSWPDRIYCSEVTWPRLDLCKLGSLTFRAPDNVKYPSMDLAYAAGRAGGTMTGVLSAANEKAVELFIDEKISYLDIFKVVELTCNAHRNELVTSPSLEEIVHYDLWARRYAASLQPSSGLSPVPA

SEQ ID NO: 72736 - protein, 648 aa, Zea mays
  Clone ID: LIB4748-018-F4_FLI.pep
AGVIKYETILPVAIGMLLLCSLLVVCRLLALVLRCPTPASSPQSAPADPTTDQALTQHLSVSRGKEHLRVTSAIARSTSPPAAAARPQRMLGHRFPTALRLPHGLLLRRSIMARRGLTIMAGGEAEGPLAGFFDYMERLRNYERSGVPRGAGTDSDDGFDLGRMRRLLRRLGDPHTHFPAVHIAGTKGKGSTAAFLSNIMRAQGYNVGCYSSPHLLTIRERISVGNDGGPVPVRLLSDLFDEAKKAIDEAIESENGSLTHFEVFTALSFLLFSQQNVGIAIIEAGLGGARDATNVIRSTELAASVITTVGREHLVALGGSLQSIAIAKSGIIKQGRPVVIGGPFSEDIEQIIRDRAFLTQSPVISACGHGIKSFTKCIDWDNGKPYQRCYISIKISRDVPLSIEMHDINLQLLGDHQRQNAVTAACAALCLCSQGWDISDASIQAGLEETQLPGRSQFLTAEEASALGFDSASTVLIDGAHTEESAKALSGVIKTVRPEGPLALVVGMASDKEHLAFAEQLLSGQTPDVVLLTEASVAGGTSRAMPASSLKEVWIAAARDRGIEYVDIGGVSGAEIPEHIDDLLDCSPSSSSGRKPMVIGCQDVAPFSSNLIVAASQLLESRGTAPGLICVTGSLHLVGAVLQQMGRH

SEQ ID NO: 72737 - protein, 758 aa, Homo sapiens
  Clone ID: LIB4119-011-A2_FLI.pep
GAGVARQLLQRPGVAVPLVLCGHLAKMPEETQTQDQPMEEEEVETFAFQAEIAQLMSLIINTFYSNKEIFLRELISNSSDALDKIRYESLTDPSKLDSGKELHINLIPNKQDRTLTIVDTGIGMTKADLINNLGTIAKSGTKAFMEALQAGADISMIGQFGVGFYSAYLVAEKVTVITKHNDDEQYAWESSAGGSFTVRTDTGEPMGRGTKVILHLKEDQTEYLEERRIKEIVKKHSQFIGYPITLFVEKERDKEVSDDEAEEKEDKEEEKEKEEKESEDKPEIEDVGSDEEEEKKDGDKKKKKKIKEKYIDQEELNKTKPIWTRNPDDITNEEYGEFYKSLTNDWEDHLAVKHFSVEGQLEFRALLFVPRRAPFDLFENRKKKNNIKLYVRRVFIMDNCEELIPEYLNFIRGVVDSEDLPLNISREMLQQSKILKVIRKNLVKKCLELFTELAEDKENYKKFYEQFSKNIKLGIHEDSQNRKKLSELLRYYTSASGDEMVSLKDYCTRMKENQKHIYYITGETKDQVANSAFVERLRKHGLEVIYMIEPIDEYCVQQLKEFEGKTLVSVTKEGLELPEDEEEKKKQEEKKTKFENLCKIMKDILEKKVEKVVVSNRLVTSPCCIVTSTYGWTANMERIMKAQALRDNSTMGYMAAKKHLEINPDHSIIETLRQKAEADKNDKSVKDLVILLYETALLSSGFSLEDPQTHANRIYRMIKLGLGIDEDDPTADDTSAAVTEEMPPLEGDDDTSRMEEVD

SEQ ID NO: 72738 - protein, 353 aa, Zea mays
  Clone ID: LIB4748-018-A4_FLI.pep
NYRVQSPRDMSYLFFYDCDRMIAFSAATGEAAAEVSLKIQSKSGPHEIRCVKRDFLLRTLADELPEGTIRYSAKVVAMEEDGVGGAKTLQLHLADGSTIKAKVVIGCDGVNSVVAQWLGLPKPILSGRSATRGLAEYPGGHGFGPEILQFIGHGFRSGVLPCSDTSVYWNYTWYPSPADGDAEESVAKMRSHVVAKLRGAKVPAEALEVVERSEMSDVASSPLRFRSPLALVRGSISRGGVCVAGDALHPMTPELGQGGCAALEDGVVLARCLGKAFALLGQERDEGRVVTAALEEYAAARRWRSIQLITAAYVVGFIQQSNNAVVRFVRDRFLSRLLSKTLVAMADYDCGAL

SEQ ID NO: 72739 - protein, 313 aa, Zea mays
  Clone ID: LIB3587-232-A9_FLI.pep
GNPRALTMANLSIRNMHLNRTTAMAMVILDTMPPLRTSSTMVSHRWPRSKAILNSQIPMLGLHTVDLVNGPPGVLPPQMAPTRRHLHLMGHRLSNLLLMGKHMVQQRDLMGMVNRVTHSRVARYQLHMVRVHQQLQDILSKARSKVAMHSTRRPNQHMVIKQLKPMRTMGTRELQQIPTTEVRTHSSQGMVLLVRQLVRLVMHPLRQRPASLCMARLDIPSHLQILQVMISLQHQRRLRAVMLRPLQIHNSLLQQKGSRHSLLLLLLLDMVLAGSGRHEPRLPNFDDSKVRLDIRFWRVFECLHLLDVCGRIM

SEQ ID NO: 72740 - protein, 212 aa, Zea mays
  Clone ID: LIB3595-057-B3_FLI.pep
GLHALPLLRAGPLRQRHRGGEPDDGHRERHPQLPHGHHRRRGDPGDIHAGVGLLQAPPRHPQALLEVPHVLHQLPLLGAAGPVPERPQGPAVRRPAGRRAAQQDPRRVHPGERVPDGRGAVQVARPGRAALHGRRLPPALLRHDQGRRGRHPPGAPPRRAPAGAEPAAPAAAARPDALAPRLRGPRRRQPAGRSPVNNVTVSCTAIYMICVC

SEQ ID NO: 72741 - protein, 137 aa, Zea mays; identical to SEQ ID NO: 47611
  Clone ID: LIB4756-012-H5_FLI.pep

SEQ ID NO: 72742 - protein, 284 aa, Zea mays
  Clone ID: LIB3689-203-F10_FLI.pep
GRHQPLSLALSDSSRHKQTNQTKQSKGKTPPPPHLVVCFSSVRAVRHKPPDRLPPLLSCACVVAVCLVAAPVMVMVEMDGGVGGGGGGGQTPAPRRWRLADERCDLRAMETDYVRRFHRHEPREHQCSSAVAKHIKAPVHLVWSLVRRFDQPQLFKPFVSRCEMKGNIEIGSVREVNVKSGLPATRSTERLELLDDNEHILSVRFVGGDHRLQNYSSILTVHPEVIDGRPGTLVIESFVVDVPDGNTKDETCYFVEALLKCNLKSLAEVSERQVVKDQTEPLDR

SEQ ID NO: 72743 - protein, 429 aa, Zea mays
  Clone ID: LIB4756-008-D3_FLI.pep
PSPIPDKTRQISWTHSTSIPLPSPAPVAMAEALVGLRVAALAVPQPRSHRRRLLPAARLAAFRRDRLSTARAAVAGPPEVDEDDSMSIDNLHRFFDLNVGKWDGSFYQFDAHGRVLQEISTRLSVSTYGEDNLISLLQSLYIKQASSAISIVDEEDSEPEWVEYKIKETNIFTVDKYQQIGFFPEEKAFALRYQTAGMLETVLRVGTLGEDDTGEESPKNLKIPSRKPSIVCENCLYSLEGNGRMRAFHIMDPKGVLDTLLIFHEKRQGSELAQSFKHYSVCTKSASSDRISTVLGRWEGHSVTKRSGVYGATLAEADTAVVLKMGSNGQLIQDTLSTKIGTGTTTTVNWTGSANENLLQFDGGYEITLLPGGMYMGYPSDISKSISQLDSFHLEFCWMESPGKRQRLVRTYDAAGLAVSSTYFFETKV

SEQ ID NO: 72744 - protein, 294 aa, Zea mays
  Clone ID: LIB3960-002-A4_FLI.pep
ARLLRPLRQARARPLHLLGRRQHRAAVGQEPGRRPARVGRAGPPAEPAHPLRRQVPALRRQQRDAARQLLPGPPGRRHQRLHVPRGRAAGPGRHALRQRLQRRGRQRPQRHAREVHRADLRAAAEGRGGGRHRPAGPRHQPRRRDHLRRARQARHHRPARLAHGTGCERVRRRPPRRGPRGGAPGGVRAPGRRGRHLLGLHAGPHVAPGRVPHRRRRQRQRRRREIRRSPEGVDIARARADRQRWTLQIQGVPRHIHRAARDGDGEGAQDVLRGERGHPSRAGHEPLTITSTVP

SEQ ID NO: 72745 - protein, 213 aa, Zea mays
  Clone ID: LIB3060-061-E11_FLI.pep
KKLWSPSNPMAALGSSVTSRGLALHTSVCVVFLRRRHGNPVIPAAPSRHQRSLATGLTTSSSGMNNAFPIIKGTTRIPAVGPGPANPAGGNLPIPSSMPPWAKWVAGAVILAIPIYRRFRTLEDKIEKTTEVAIEVVDTVAEAAEKVAGEVAGAFPGNDGLREAASKIKTVADEIEEDAEKAEALIEKVDEIKKEVDSIVDPIIDKVVKDKEI

SEQ ID NO: 72746 - protein, 591 aa, Zea mays
  Clone ID: LIB4757-001-B6_FLI.pep
FPLVSSRLVPYSRPVRLHLRSPGPDTPLYQSRPPAHFSHPRAASGAGEPSRRSSNDPSLSRPVSLPLPAQGEERERMWSSSQASTRGVVEMGRVEAGPSHFPKRPAPQNSARVNLSRTHTVKPTSAGDRSGISVKCNLGWSSQPSPDLRHHFRGYSSASEAVLTSQSDVRKLFVGNEKIGVLLLNLGGPETLDDVQPFLFNLFADPDIIRLPRLFRFLQKPLAKFISEVRAPKSKEGYASIGGGSPLRQITDAQAEALREALHGKDVPANVYVGMRYWHPFTEEAIEQIKRDGITKLVVLPLYPQFSISTSGSSLRLLESISREDEYLVNMQHTVIPSWYQREGYIKAMATLIENELTKFQEPQKVMIFFSAHGVPLAYVEEAGDPYKAEMEECIDLIMEELEKRGITNPCILAYQSRVGPVEWLKPYTDETIIELGQKGVKSLLAVPISFVSEHIKTLEEIDVEYKELALESGIKHWGRVPALGCEPTFISDLADAVIESLPYVGAMAVSNLEARQSLVPLGSVEELLAAYDSKRDELPPPVIVWEWGWTKSAETWNGRAAMLAVLALLVLEVTTGEGFLHQWGILPLFR

SEQ ID NO: 72747 - protein, 161 aa, Zea mays
  Clone ID: LIB4725-002-E10_FLI.pep
HLAVHQRAQPSTTYGDEAPRQQLLAACGCCPAPPTPPRRRLLPLHGSGGSPPAFSWRPSPSAGSPSRERCQGCISWCRRRRRPCAPGRWHGQQRRRPLLQNPPRDDDDDNGSGGVRGGERQGRVRAEAAARRRAPRLHLHAAQGQAVTVSDEDGACRGCRK

SEQ ID NO: 72748 - protein, 166 aa, Zea mays
  Clone ID: LIB3912-020-D1_FLI.pep
ILADCNHFAPPMPASDLVELLRPHHRIGLGNRVPCCSPIVELTVMFVGVAVHRTVHVPASAAKSRQPNTLPAGRAPVWAFLGLGDYSSSLAGFSYKHGLHNNSLLLNLRNCHIYRCSNYRSFPAVTAIDNAIDGGGSQLGLLLLRYHLLVALGAHVHRRSTAEEAA

SEQ ID NO: 72749 - protein, 261 aa, Zea mays
  Clone ID: LIB4757-018-F2_FLI.pep
LVRHYYSRPATGRPMDALLDAQPLLHPADEVVDLLGRVEVLGDAGALGAALGPGGQPRALLLHADAAEAVVGEEPGREGHERDVDEAEGVAAEEGPVAERALQRAEDLDHLGARLRLAVPLELPQPGAAVVELLVDVVRPEAGLRARVGVGGEQRRRRRRERLVEVLHDDEGLADGAAVVQQHGDLLMHRVGAEEQLALVPQVLLQVLVGQALLVHRDAAALPEWAHPEVQQLQALLLLLGHVELFLVLASGVSYLAACVR

SEQ ID NO: 72750 - protein, 67 aa, Zea mays subsp. mexicana
  Clone ID: uC-zmflteosinte42f12_FLI.pep
VKTFPVILLPKEKLVDTNGAGDAFVGGFLSQLVLGKGMEDCVRAGCYAANVIIQRPGCTYPEKPDFN

SEQ ID NO: 72751 - protein, 260 aa, Zea mays
  Clone ID: LIB4758-032-B6_FLI.pep
TRRHRRVFCGDLFVANSPAAKMRPVFVGNLDYDTRHSELDRLFYRYGRVERIDIKSGYAFVYFEDERDGNDAIRALDGYPFGPGRRRLSVEWSRGEQAGRRDGNKPEANTKPTRTLFVINFDPMNTRVSDIERHFTPFGNISSVRIRKNFAFVQFETMEEARKALEATHATTLLDRVISVEYAFRDDSEVSDRYGSPRRGGGYGRRGDSPVYRSRPSPDYGRPASPVYGSYDGPGPVRDRYRRSLAYRSRSPPAKRRAYD

SEQ ID NO: 72752 - protein, 194 aa, Zea mays
  Clone ID: LIB3136-052-G5_FLI.pep
HPWCANLSVFFSFQILLLLLALIAVPWMLFPKPFILKKLHKERFQGHTYRFLGTSEMDPDSEPDSARARHDDFHFSEVFVHQMIHSIEFVLGAVSNTASYLRLWALSLAHSELSTVFYEKLLLLAWGYDSLIVKFVGLIVFSFATAFILLMMETLSAFLHALRLHWVEFMNKFYHGDGYKFKPFSFALLADDED

SEQ ID NO: 72753 - protein, 377 aa, Zea mays
  Clone ID: LIB4758-044-E12_FLI.pep
SFPSSSAVVAKASPASPCAAPHFRPRAVRAAIRAQASAVEAPATAKAKKESKKQEEGVVTNLYKPKEPYVGRCLLNTKITGDDAPGETWHMVFSTEGPSLPARGLRIRGEKKREEKMMTVSTSCYMCRSLVPAPPLKSRSAVRCPSAAPPGASGATSTFKLVLEVKERLAREHPGLPTGRNGRDDDDMVLWFLKDRKFSVDEAVSKLTKAIKWRQDFGVAELSEESVKSLYQTGKAYVHDSLDIYGRPVLIVVAAKHFPSTQDPVENQKLCAYLVEKAVNRLPPGAEDILGIFDLRGFRVENGDLQFLKFLMDVFYYYYPKRLGQVLFVDAPFVFQPMWQVVKPLLKSYASLVRFCDAETVRKEYFKEETVPPDFRD

SEQ ID NO: 72754 - protein, 835 aa, Zea mays
  Clone ID: LIB4148-005-C12_FLI.pep
SRRRHRALISSVLGGLRGAAVAGAWRPKIRPDLMSGGTGSSGRAAPRYAPDDPTLPKPWRGLVDGTTGYLYYWNPETNVTQYERPVPPESQLLPPPPPLPPPPPRSRDRRDRSRSRSRTPPRRDHRDRDRDRDRRHDEHASSKTASSHHHPAPVAVADDPSTEAYRRRHEITVTGDNVPTPITSFEAGGFPSEILKEIQRAGFASPTPIQAQSWPIAMQNQDVVAIAKTGSGKTLGYLLPGFMHIKRLQNSTRNGPTVLVLAPTRELATQILDEAVKFGRSSRISCTCLYGGAPKGPQLRDLDRGVDVVVATPGRLNDILEMRKVSLKQVSYLVLDEADRMLDMGFEPQIRKIVKEIPHRRQTLMYTATWPKEVRRIADDLLVHPVQVTIGSVDSLVANSSITQHVEIITPSEKQRRLEQILRSQDSGSKILIFCTTKRMCDQLARTLTRQFGASAIHGDKSQSEREKVLNQFRSGRSPILVATDVAARGLDIKDIRVVINYDFPTGVEDYVHRIGRTGRAGATGVAYTFFCDQDSKYAADLIKILEGANQRVPRDLEDMASRGGGRGRKRNHWASRPDRGGSRSELDSRYSSRDGLASSGKSESGRGSRGRDDNGSRGRYDPGETDGRSRRSTRGRSRSRSKSDSRSRSPSPKKSRRHEGRRSRTKSRSRSRSRRNHGASHSKSRSPVASRRYEKTASGSARPNSGHAEHKSPPRSHSRDDHVNHSDHKDDHKDDHMEDGKMERVDLDRSPSPHDDKSAPYSPVYNGKASGSMSPNGQPEAGAKFVEPSGKPEPASPVRCSKGRDDDEEGIIDEDGEIGEDDPRANAAVQNGNN

SEQ ID NO: 72755 - protein, 182 aa, Zea mays
  Clone ID: LIB4758-011-H12_FLI.pep
RVIFLQYMSATDHLVMARVIQDVLDPFTPTIPLRITYNNRLLLPSAELKPSAVVSKPRVDIGGSDMRAFYTLVLIDPDAPSPSHPSLREYLHWMVTDIPETTSVNFGQELIFYERPDPRSGIHRLVFVLFRQLGRGTVFAPEMRHNFNCRSFARQYHLSIATATYFNCQREGGSGGRRFREE

SEQ ID NO: 72756 - protein, 825 aa, Zea mays
  Clone ID: LIB4171-029-B6_FLI.pep
TTLPAMACALQAVAGQLHKEERTSPHTHTHMDRPIQRKVNDENDGGTIWRHTRVQVLFFMYFPPPPLLLLRPCADGSMDGGAWRLLVDVDGQRLAVPLLEALEHGVDELALADAEEHLVALLAGGLELLAGEEHAAELLAHEAVQRERAAVRDPVGHGGGALGDGDAGGLHLVGQHRAELLLELGDPGEDGGLALRVAAAEGVVHQHGAQLLHQRQAGAGRVLRVREHGLAVDGGDELLLAEARAGEVPRGVHGQHLLGHLGHRVLDGGLDVLLQVAQVDGLAQRDDVGGRHELEDVDGLGGLPGRDEAQGVDVLVVLLRALHVVGDGVAQVLELGAVGGHGDLGALESVVQAGVAAAGQVGGEAVVVELVDELGELREHELADVGDGEAGVVHGHADGGALEVAAVQRLAAVDVNDRVVVDGVDLALDGLGGGADDLDLGAEPLRRRAERVPVLLGLEQRVQLVHLLGVLHEGAALKDVLHDGRGLDGPRVVLELVGEVVGVLGLAVHDLTEDGGQDLGEDGQDVGVVHDGGRERGAHGGAVDDGEALLGVELEEAALDAGDLERLGGVHLPAVDGDGLRVGAARDEAGDVGERDQVARRGDGAPERQARADPGVEQLGDGLEDLEADAGVALQERVDAHQHRRPGDLRRQRVAIAAGAEDSGVEMPEQLDLQRGPVLGAAVGGAAEAGGDAVDVAAVGDAVEDPLAAGLDAGAGLLVELDGDAGRVPGGRDGGHLADAERGALDLHHRLPGLRHHALHLVQVAPRQLRRRRAPVQRVALNDGAVARHCCAVAGVPRGGRREGGGGAGAGACGVVEKKRSRRGV

SEQ ID NO: 72757 - protein, 387 aa, Zea mays
  Clone ID: LIB4758-070-E12_FLI.pep
IKRISYPAQQSAVYTITFMHTMALSTQDLLEAHVELWHQSLCYAKSLALAVALDLRIPDAIHHHGGSATLPQILAETAAHPSKLRALRRLMRVLTVSGTFSVEQQPPAGGDDSTVDAPDEAVYRLTAASRFLVSDEVSSATLAPFVSLALHPIAVSPHTMGICAWFRQEQREPSPYGLAFQQTFPTIWEHADDVNALLNKGMVADSRFLMPIMLRECGEVFRGIESLVDVGGGHGGATAAIAAAFPHLKCSVLDLPHVVAGAPSDVNVQFVAGNMFQSIPPATAVFLKTTLHDWGDDECVKILKNCRQAISPRDAGGKVIILDMVVGYGQPNITHLETQVMFDLYIMTVNGAERDEQEWKKIFIEAGFKDYKILPILGALSVIEVYP

SEQ ID NO: 72758 - protein, 648 aa, Zea mays
  Clone ID: LIB3732-008-E4_FLI.pep
AFFVYGGCNLVLAAAAAAICAYIAPAAAGSGIPEVKAYLNGVDAYSILAPSTLFVKIFGSILGVSAGFVLGKEGPMVHTGACIANLLGQGGSRKYHLTCNWLRYFKNDRDRRDLITCGSAAGVAAAFRAPVGGVLFALEEAASWWRSALLWRTFFTTAVVAVVLRGLIEFCRSGKCGLFGQGGLIMFDLSSTVAVYSTPDLIAIIVLGIIGGIFGGLFNYLLDKILRVYSIINERGAPFKILLTITISIITSMCSYGLPWLAACTPCPVDAVEQCPTVGRSGNYKNFQCPPGHYNGLASLFFNTNDDAIRNLFSNGTSTEFQMSSLFIFFTAIYCLGLVTYGIAVPSGLFIPVILAGATYGRIVGTLLGSISDLDPGLFALLGAASFLGGTMRMTVSVCVILLELTNDLPMLPLVMLVLLISKTIADSFNKGVYDQIVVMKGLPYMEAHAEPYMRHLVAGDVVSGPLITFSGVEKVGNIVHALRLTGHNGFPVLDEPPITETPELVGLVTRSHLLVLLNSKNFMKGRVKTSGSFVLRRFGAFDFAKPGSGKGLKIEDLDFTDEEMDMYVDLHPITNTSPYTVVETMSLAKAAILFRELGLRHLLVVPKTPDRPPIVGILTRHDFMPEHIHSLFPNLNPHKYHSASMAG

SEQ ID NO: 72759 - protein, 407 aa, Zea mays; identical to SEQ ID NO: 46427
  Clone ID: LIB4758-082-A11_FLI.pep

SEQ ID NO: 72760 - protein, 193 aa, Arabidopsis thaliana
  Clone ID: JC-ATXP62C201N18T7_FLI.pep
LCDAEVALIVFSTRGRLYEYANNNIRSTIERYKKACSDSTNTSTVQEINAAYYQQESAKLRQQIQTIQNSNRNLMGDSLSSLSVKELKQVENRLEKAISRIRSKKHELLLVEIENAQKREIELDNENIYLRTKVAEVERYQQHHHQMVSGSEINAIEALASRNYFAHSIMTAGSGSGNGGSYSDPDKKILHLG

SEQ ID NO: 72761 - protein, 248 aa, Glycine max
  Clone ID: LIB3109-009-C12_FLI.pep
LFYCVSEREKINMGRGRVVLERIENKINRQVTFSKRRSGLLKKAFELSVLCDAEVALIIFSSRGKLFQYSSTDINKIIERYRQCRYSKSQTDDSLEHDSQSSYHEFLKLRAKYESLELTQRHFQGEELEPLSFKDLQSLEKQLDITLALTRQHQTKKLLARADELREKVHKLEDLNKQLESKEKDEFSSLILDNNNYIQVHATQGDQFESGTTLNTCRFQRQDSKEKAIDTKTDGSQSSHNKNKGWLL

SEQ ID NO: 72762 - protein, 665 aa, Glycine max
  Clone ID: LIB3138-011-B1_FLI.pep
EEREKLIESPMLGDSAVLGTGGGGSGDAVAAAPPAASGGAHDGGVDGGDGGGGGSNSGDDRVEEGERSFGGNRWPKQETLALLKIRSDMDVAFRDASVKGPLWEEVSRKLAELGYNRNAKKCKEKFENVYKYHKRTKEGRSGKSEGKTYRFFDQLQALENNPAIHGKQSPTPPKPPPQTTALSATPVSIVVTTTTTTPSSIIMPLPLPPVSNNNNNTTVPSTTSLPMPQSILNITPPSTLNITIPSFPPSNPTTYFPTQTPNPTSNNNNNPPSTITPPSFPNFPADLLSNSSSSSTSSEETPTTEARGRKRKRKWKDFFERLMKEVIEKQEELQRRFLEAIEKREQERVVREEAWRMQEMQRINREREILAQERSIAAAKDAAVMTFLQKIAEHQQQETINLEPALNNNSITVVPQQPVPQATPTSTPTPQQAQTTTVPEAPQVQPLVPQLQQQQQIVVSNVEINKADNNGENLMMEASSSRWPKVEVQALINLRTSLETKYQESGPKGPLWEEISALMRKMGYNRNAKRCKEKWENINKYFKKVKESNKKRPEDSKTCPYFHQLEALYREKNKGEGQMKPESMMAPLMVQPEQQWPPQTTLVVPPEVTMGDTQNDPMDRQYHEENEDDEDDKEIGDEDEDEDDEGGDNYEIVASKPATADASGE

SEQ ID NO: 72763 - protein, 160 aa, Zea mays
  Clone ID: LIB4762-050-F3_FLI.pep
RTRTYPPLLSWRLRARCFLFLPAAAMASGNNNKQRSEEEWRVVLSPEQFRILRLKGTELPGTGEYNKFYGDGVYNCAGCGTPLYKSATKFDSGCGWPAFFEGLPGAINRTPDPDGRRVEITCAACGGHLGHVFKGEGFKTPTDERHCVNSVSIKFSPGSS

SEQ ID NO: 72764 - protein, 436 aa, Glycine max
  Clone ID: LIB3093-037-E4_FLI.pep
KTSLSHSLSLSITLSHPLGFPFHRILSLQPRLVISMEGAGMEENNIINDDDNNNKSEAHLTSAAAFVEGGIQDACDDACSICLEAFCDSDPSTVTSCKHEFHLQCILEWCQRSSQCPMCWQPISLKDPTSQELLEAVERERNFRFNPSRNATIFHHPTLGDFELQHLPVGASDADLEERIIQHLAAAAAMGRARHIARREGQRNRSSAQGRPHFLVFSTNPNSPPMAPASSSPSQRGDDEPIPTIAVANLSPTPATGEESSQLTLVPPIQAEQVSASGSGSTALATDHQGSSYNNRRSPNQSSPSSQDRAGPSELQSFSESLKSKLNAVSTRYKESISKSTRGWKERWFSRNNTMSDLGSEVRREVNAGIATVSRMMERLETSDNNRSNSNSAPSNIEDGSVQEYNGQTLTPGNEGDGLLRDNNTKASCAAGSSSN

SEQ ID NO: 72765 - protein, 149 aa, Glycine max
  Clone ID: LIB3138-124-B7_FLI.pep
ASWNEPSHHKRQRSSNDELLSDSQDGELGNQVQTLSHHLSLPRTSSDMFAMDSLLQFSDSVPCKIRAKRGFATHPRSIAERVRRSRISERIRKLQELVPNMDKQTSTAEMLDLAVDYIKDLQKEFKTLNDKRAKCKCINMQKSEADQVA

SEQ ID NO: 72766 - protein, 416 aa, Zea mays
  Clone ID: LIB4762-032-H2_FLI.pep
FSHRCAAPSARLPPVRRRLAVEPPPSLSTSLTTGPCDSAAVQCCCSGRAGGEKMGVYLSTPKTDKLSADGENSRVRFGLSSMQGWRTTMEDAHAALPDLDECTSFFGVYDGHGGKAVSKFCARHLHKQVLINDANSSGDLPTSLHKAFLRMDEMMKGQRGWRELTELGDKGNTISGMIDDIIWPPKGGDSDKIREDWDTEEGPNSNFPGPTSGSTACVAVIRNDKLIVANAGDSRCVISRKGQAYNLSTDHKPDLEEERERILGAGGFVVAGRVNASLNLSRAIGDMELKQNDLLPVERQIVTAEPELKTVQLSEDDEFIVLACDGIWDCMSSQEVVDFVHKQLKTEDKISSVCEKLLNRCVAPTSGGEGCDNMTVIVVQFKKPALAVATSSAEQSATTAEGMRPNEVDGPDYPPK

SEQ ID NO: 72767 - protein, 235 aa, Zea mays
  Clone ID: LIB3637-254-F2_FLI.pep
LVKADFWLIWLSLLLGSGSGLTVIDNLGQMSQAIGYKNAHIFVSLVSIWNFLGRVGGGYFSEIIVRERTYPRHIALAVAQIVMAAGHFLFAMAWPGTMYIASLLVGLGYGAHWAIVPAAVSELFGVKHFGAMYNFLILANPAGSLIFSELIVSNLYEHEAEKQASQQQMSALLSPRLLRDTGFLADDALKCEGPACFFFSSLIMSVFCAVAAGLSLLVVQRTRQVYPRLYSSVRT

SEQ ID NO: 72768 - protein, 253 aa, Zea mays
  Clone ID: LIB4762-083-D3_FLI.pep
KNSVSNSRVLLLSDPELRRPQHQARPPSRVTEMALPNQGTVDYPSFKLVIVGDGGTGKTTFVKRHLTGEFEKKYEPTIGVEVHPLDFTTNCGKIRFYCWDTAGQEKFGGLRDGYYIHGQCAIIMFDVTSRLTYKNVPTWHRDLCRVCENIPIVLCGNKVDVKNRQVKAKQVTFHRKKNLQYYEISAKSNYNFEKPFLYLARKLAGDPNLHFVEAVALKPPEVTIDMAMQQQHEAELAAAAAQPLPDDDDDLIE

SEQ ID NO: 72769 - protein, 299 aa, Glycine max
  Clone ID: JC-GMLE01810009D03_FLI.pep
FFTWYFLNVIFNILNKKIYNYFPYPYFVSVIHLFVGVAYCLVSWAVGLPKRAPIDSNLLKLLIPVAVCHALGHVTSNVSFAAVAVSFTHTIKALEPFFNAAASQFILGQSIPITLWLSLAPVVIGVSMASLTELSFNWVGFISAMISNISFTYRSIYSKKAMTDMDSTNIYAYISIIALIVCIPPAVILEGPTLLKHGFNDAIAKVGLVKFVSDLFWVGMFYHLYNQVATNTLERVAPLTHAVGNVLKRVFVIGFSIIVFGNKISTQTGIGTAIAIAGVALYSFIKARMEEEKRQAKAA

SEQ ID NO: 72770 - protein, 348 aa, Glycine max
  Clone ID: UC-GMFLMINSOY036D11_FLI.pep
KLKMESEKKSSAISDVGAWAMNVVSSVGIIMANKQLMSNNGYAFSFASSLTGFHFAVTALVGLVSNATGYSASKHVPMWELIWFSLVANMSITGMNFSLMLNSVGFYQISKLSMIPVVCVMEWILHNKHYSREVKMSVVVVVIGVGVCTVTDVKVNLKGFMCACIAVLSTSLQQISIGSLQKKYSIGSFELLSKTAPIQALFLLILGPFVDYYLSGKLITNYKMSSGAILFILLSCSLAVFCNVSQYLCIGRFSAVSFQVLGHMKTVCVLTLGWLLFDSELTFKNIMGMVIAVVGMVIYSWAVELEKQSNAKTLPHAKNSMTEEEIRLLRDGVEKSPLKDVELGEAQG

SEQ ID NO: 72771 - protein, 217 aa, Zea mays; identical to SEQ ID NO: 65920
  Clone ID: LIB4765-013-B12_FLI.pep

SEQ ID NO: 72772 - protein, 425 aa, Glycine max
  Clone ID: LIB3049-048-G9_FLI.pep
RSPFTIFYNPRACPSEFVIPLAKYRKSVFGTQVSVGMRFGMMFETEESGKRRYMGTIVGISDVDPLRWPGSKWRNIQVEWDEPGCGDKQNRVSVWEIETPESLFIFPSLTSGLKRPLPSGLLENEWGTLLRRPFIRVPENGTMELSNSIPNLYSEHMMRMLLKPQLINNNGAFLSAMQQESAATRGPLQEMKTTLAAENQMPLKNLHPHSIPDQPNALNMQSLLKNDQPEKLHPLGKIDNHLSSGIVIDKPKSESEVLPDHVIDYPSMEGCNIEKVAANPVNQQGLANQLPFHNQNQSPLLPQSSPWPMPPQIELSMPHPQMIDMVQADSAMVNGLFPQLDINEWMSYASSQPFAGQNRPTGPLSDLQEHTSLQPQVVNPPLPSMNNEVWDHYVKNLKFLSQADQLTSICQPGLYGSMAYQAQTI

SEQ ID NO: 72773 - protein, 932 aa, Glycine max
  Clone ID: 700838909_FLI.pep
RNANVRSRLRDGFGPSVAHVCAYHGQPDCMRELLLAGADPNAVDDEGESVLHRAIAKKYTDCALVILENGGCRSMAILNSKNLTPLHHCVAIWNVAVVKRWVEVATSDEIAEAIDIPSPIGTALCMAAASKKDHENEGRELVRILLAAGADPSAQDSQNGRTALHTAAMTNDVDLVKDDDGDNAFHIAAETAKMIRENLDWLIVMLMKPDADIEVRNHSGKTLRDILEALPREWLSEDLMEALVNKGVHLFPTIFKVGDWVKFKRSVTTPTHGWQGAKPKSVGFVQSVPDRDNLIVSFCSGEVHVLANEVIKVVPLDRGQHVHLKEDVKEPRFGWRGQSRDSIGTVLCVDDDGILRVGFPGASRGWKADPAEMERVEEFKVGDWVRIRPTLTSAKHGLGSVTPGSIGIVYCIRPDSSLLIELSYLPNPWHCEPEEVEHVAPFRIGDQVCVKRSVAEPRYAWGGETHHSVGRISEIENDGLLIIEIPNRPIPWQADPSDMEKVEDFKVGDWVRVKASVSSPKYGWEDVTRTSIGVIHSLEEDGDMGVAFCFRSKPFSCSVTDMEKVPPFEVGQEIHVMPSVTQPRLGWSNESPATVGKILKIDMDGALNVRVTGRQNLWKVSPGDAERVPGFEVGDWVRSKPSLGTRPSYDWNSVGRESLAVVHSVQDSGYLELACCFRKGKWITHYTDVEKVPSFKVGQYVRFRTGLVEPRWGWRGAEPESHGVITSIHADGEVRFAFFGLPGLWRGDPSDLEIEQMFEVGEWVRLNYNANNWKSIGPGSVGVVQGIGYEGDELDRSIFVGFCGEQEKWVGPSSHLERFDKLFVGQKVRVKQYVKQPRFGWSGHTHASIGTIQAIDADGKLRIYTPAGSKTWVLDPSEVEVVEEKELCIGDWVRVKASISTPTHHWGAIHVLMLINRRGGRMEAVEIGKLSC

SEQ ID NO: 72774 - protein, 257 aa, Zea mays; identical to SEQ ID NO: 49518
  Clone ID: LIB4865-009-G5_FLI.pep

SEQ ID NO: 72775 - protein, 173 aa, Allium porrum
  Clone ID: LIB3804-017-E3_FLI.pep
ARDALKRGAPIIAEYLGGAVSCDAYHMTDPRADGLGLSTCIQRCLEDARVSPEEVNYINAHAASSLVGDLAEVNAIRQVFKDPTGIKINATKSMIGHCLGAAGGLEAIATIKAITTGWLHPSINQLNPEPAVEFDTVPNKKQQHEVNVAISNAFGFGGHNSVVVFAPYKPWIS

SEQ ID NO: 72776 - protein, 402 aa, Glycine max
  Clone ID: UC-GMFLMINSOY031G02_FLI.pep
IFRLPFTMISSLRQPVVGISGSDLLLRQRHATLIKARSFLPSLSREKGQRSLVSVQKPLHIAASLGVGNFVSVKSDDDKRGDLVKCEAYEADRSEVEGASTPSEAAKKVKIGIYFATWWALNVVFNIYNKKVLNAYPYPWLTSTLSLACGSLMMLISWATGIAEAPKTDPEFWKSLFPVAVAHTIGHVAATVSMSKVAVSFTHIIKSGEPAFSVLVSRFLLGESFPVPVYLSLIPIIGGCALAAVTELNFNMIGFMGAMISNLAFVFRNIFSKKGMKGKSVSGMNYYACLSILSLAILTPFAIAVEGPQMWAAGWQTAMSQIGPQFIWWLAAQSVFYHLYNQVSYMSLDQISPLTFSIGNTMKRISVIVSSIIIFHTPVQPINALGAAIAILGTFLYSQAKL

SEQ ID NO: 72777 - protein, 641 aa, Zea mays
  Clone ID: LIB3239-035-E12_FLI.pep
VPGARGFYLPGSYPHKYNVGDDLNVKVNSLTSIDTEMPFSYYSLPFCEPQDGVKDSAENLGELLMGDRIENSPYRFRMYTNESDVFLCRSPPLGADAFSLLKKRIDEMYQVNLILDNLPAIRYTRKDDYIMRWTGYPVGIRVGVDYYVFNHLQFTVLVHKYEDANVARVIGAADATDAIPSGAKDAASSSPGWMVVGFEVVPCSIKHNPEDVKSRKMYDSYPSKIKCDPTTVSMSIKENEPIVYTYEVNFVESDIKWPSRWDAYLKMEGAKVHWFSILNSLMVIAFLAGIVFVILLRTVRRDLTKYEELDSEAQAQMNEELSGWKLVVSDVFRAPSNPMLLCIMVGDGVQILGMAVVTILFAALGFMSPASRGTLITGMLFFYLVLGILAGYVGVRVWKTIKCGDHSGWVAVSWRVACFFPGIAFLILTTLNFLLWGSHSTGAIPFSLFVVLLLLWFCISVPLTLVGGFLGAKAPHIEYPVRTNQIPREIPPQKYPSWLLVLGAGTLPFGTLFIELFFIMSSIWMGRVYYVFGFLFVVLLLLVIVCAEVSLVLTYMHLCVEDWKWWWKSFFSSGSVAIYIFLYSINYLIFDLKSLSGPVSATLYIGYSLFMVIAIMLATGTVGFISSFCFVHYLFSSVKAD

SEQ ID NO: 72778 - protein, 541 aa, Glycine max
  Clone ID: LIB3087-010-D12_FLI.pep
FNEVGVGKNFKSKSVVHDKAEEFELSRERGKPNPMQSSHMELGGREECGVMEMDVNQVTQSAPDSPPFCDTKGSDNDFSDQGSEHPLLPGRLENSSLKRAGTGNGNLKERMGQLRSESSASETEGLARDLKRQKNLDFKPGKEPGAPLPKIDMCPTGRICSFCQSSKISEATGPMLHYANGNLVTGDAAMKPNVIPVHRICIDWAPQVYFVGEVVKNLKAEVARGAKLKCSKCNLKGAALGCYVKSCRRTYHVPCAMDISDCRWDHEDFLLLCPVHSNVKFPCEKIRSKKKATQKHPTFSHLPSHHSNRLEASQDASKKLVFCGSALSNEEKVFLINYASKVGATVTKFWTSNVTHVIAATDAHGACSRTLKVLMAILNGRWVLKMDWIKACMQEINPVEEEPYEINLDNQGCQGGPKAGRLRALANEPKLFSGLKFYFSGDYVSTYKEDLEELIEVGGGTVLRIKEELEAHRHECKGDSSKLLVVYNLDPPQGCKLGEEVSILWQRLNDAEDLAANTLQVIGHTWILESIAACKLQPFVY

SEQ ID NO: 72779 - protein, 368 aa, Homo sapiens
  Clone ID: LIB3064-101-H9_FLI.pep
HLWAAAAAETHGQAKAKSGWLKPYYFIELMESRKDITNQEELWKMKPRRNLEEDDYLHKDTGETSMLKRPVLLHLHQTAHADEFDCPSELQHTQELFPQWHLPIKIAAIIASLTFLYTLLREVIHPLATSHQQYFYKIPILVINKVLPMVSITLLALVYLPGVIAAIVQLHNGTKYKKFPHWLDKWMLTRKQFGLLSFFFAVLHAIYSLSYPMRRSYRYKLLNWAYQQVQQNKEDAWIEHDVWRMEIYVSLGIVGLAILALLAVTSIPSVSDSLTWREFHYIQSKLGIVSLLLGTIHALIFAWNKWIDIKQFVWYTPPTFMIAVFLPIVVLIFKSILFLPCLRKKILKIRHGWEDVTKINKTEICSQL

SEQ ID NO: 72780 - protein, 614 aa, Zea mays
  Clone ID: LIB4171-020-E3_FLI.pep
APLLGSDPVSPAAMSQPAATVAAAAQPQGRGPAGRQGGLGQSIAGIVRMAVFWYFASKFFGPKRPPADPGMLMSNLFQKGEPMDMWMYLSENEKFNDFANEDALIWHEANIPYAVWGPTSTRTRSLTYYPSEALKHNGSLYAHVYFARSGYPVDPTDPEYEQKSSFGRIHPVVAFLPKSKAGKKKSLLGDSEEPEEKTPRNKENKESEDKDEGPTEYISYWKPNVTINLVEDFTRYPNNNVPPIVAPYLNVDPVTGDYYPTVFFNEFWLLKDKLIALNETVEELPLNLEVGPFSMTKWQLFLQIEQSFQVHRSYGSMLEGEADELKRVFLEGNPYLLGLTMVVSLLHSLFDFLAFKNDIQFWNKNKSMEGLSAKSVVLNFVCQLVVFLYLLDNDTSWMILASSGVGVCIEFWKIGKAMHIEVDRSGKIPMLRFRDRESYAQNKTKEYDAIAMKYLTYVLFLLVVGFSIYSLKYEKHKSWYSWILSSMTSCVYMFGFIMMCPQLFINYKLKSVAHMPWRQMTYKFLNTIIDDLFAFVIKMPMLHRLSVFRDDVIFLIYLYQRWKYPVDKKRVNEFGFGGEDEPAAQEAVEGSDSAAAPQLTEAGSETSTEDKKTK

SEQ ID NO: 72781 - protein, 490 aa, Homo sapiens
  Clone ID: LIB4656-015-B6_FLI.pep
MEQKPSKVECGSDPEENSARSPDGKRKRKNGQCSLKTSMSGYIPSYLDKDEQCVVCGDKATGYHYRCITCEGCKGFFRRTIQKNLHPTYSCKYDSCCVIDKITRNQCQLCRFKKCIAVGMAMDLVLDDSKRVAKRKLIEQNRERRRKEEMIRSLQQRPEPTPEEWDLIHIATEAHRSTNAQGSHWKQRRKFLPDDIGQSPIVSMPDGDKVDLEAFSEFTKIITPAITRVVDFAKKLPMFSELPCEDQIILLKGCCMEIMSLRAAVRYDPESDTLTLSGEMAVKREQLKNGGLGVVSDAIFELGKSLSAFNLDDTEVALLQAVLLMSTDRSGLLCVDKIEKSQEAYLLAFEHYVNHRKHNIPHFWPKLLMKEREVQSSILYKGAAAEGRPGGSLGVHPEGQQLLGMHVVQGPQVRQLEQQLGEAGSLQGPVLQHQSPKSPQQRLLELLHRSGILHARAVCGEDDSSEADSPSSSEEEPEVCEDLAGNAASP

SEQ ID NO: 72782 - protein, 268 aa, Zea mays
  Clone ID: LIB4762-065-G2_FLI.pep
TLGLAVVGGAAVMSHFGRTGPPDIRDTFSLLVLNISFRTTADDLFPLFERCGKVVDVFISRDRRTGDSRGFAFVRYKYADEAQKAIDRLDGRNVDGRNIMVQFAKYGPNAVPIHKGRVKEGVEKSRDRSRSRSPRPRHRDRDDRRRSRSRSRSRERHVHDRDRDYRRRSRSRSRSMSSSPDHKSHRRARDDVKRKSRSKSRSRSRSRSRSYHSSSPARRSASPPKSPPPQRSPTPEKHANGKDSPLSRSVSPSPKRASSRSPGSDSKE

SEQ ID NO: 72783 - protein, 608 aa, Zea mays
  Clone ID: LIB4980-006-B3_FLI.pep
QAAAGDARREPQSEQATMCGILAVLGVAEVSLAKRSRIIELSRRLRHRGPDWSGLHCHEDCYLAHQRLAIIDPTSGDQPLYNEDKTVVVTVNGEIYNHEELKAKLKTHEFQTGSDCEVIAHLYEEYGEEFVDMLDGMFSFVLLDTRDKSFIAARDAIGICPLYMGWGLDGSVWFSSEMKALSDDCERFITFPPGHLYSSKTGGLRRWYNPPWFSETVPSTPYNALFLREMFEKAVIKRLMTDVPFGVLLSGGLDSSLVASVASRHLNETKVDRQWGNKLHTFCIGLKGSPDLKAAREVADYLSTVHHEFHFTVQEGIDALEEVIYHIETYDVTTIRASTPMFLMSRKIKSLGVKMVISGEGSDEIFGGYLYFHKAPNKKEFHEETCRKIKALHLYDCLRANKATSAWGVEARVPFLDKSFISVAMDIDPEWKMIKRDLGRIEKWVIRNAFDDEERPYLPKHILYRQKEQFSDGVGYSWIDGLKDHASQHVSDSMMMNAGFVYPENTPTTKEGYYYRMIFEKFFPKPAARSTVPGGPSVACSTAKAVEWDASWSKNLDPSGRAALGVRDAAYEDTAGETPASADPVSDKGLRPAIGESLGTPVASATAV

SEQ ID NO: 72784 - protein, 503 aa, Zea mays subsp. mexicana
  Clone ID: UC-ZMFLTEOSINTE073D06_FLI.pep
QVRAMENEMLLRIKQCGLDITPKILIVTRLLPDATGTTCGQRLEKVLGTEHCHILRVPFRTENGIVRKWISRFEVWPYLETYTDDVAHEIAGELQANPDLIIGNYSDGNLVACLLAHKMGVTHCTIAHALEKTKYPNSDLYWKKFEDHYHFSCQFTTDLIAMNHADFIITSTFQEIAGNKDTVGQYESHMAFTMPGLYRVVHGIDVFDPKFNIVSPGADLSIYFPYTESHKRLTSLHPEIEELLYSQTENTEHKFVLNDRNKPIIFSMARLDRVKNLTGLVELYGRNKRLQELVNLVVVCGDHGNPSKDKEEQAEFKKMFDLIEQYNLNGHIRWISAQMNRVRNGELYRYICDTKGAFVQPAFYEAFGLTVVEAMTCGLPTFATAYGGPAEIIVHGVSGYHIDPYQGDKASALLVDFFDKCQAEPSHWSKISQGGLQRIEEKYTWKLYSERLMTLTGVYGFWKYVSNLERRETRRYLEMLYALKYRTMASTVPLAVEGEPSSK

SEQ ID NO: 72785 - protein, 416 aa, Zea mays; identical to SEQ ID NO: 65564
  Clone ID: LIB4826-011-G12_FLI.pep

SEQ ID NO: 72786 - protein, 227 aa, Zea mays
  Clone ID: LIB4570-008-H8_FLI.pep
RPVKRLLVKNPRARLTAAQALSHPWVREGGEASDIPVDISVLSNMRQFVKYSRFKQFALRALASTLNEEELSDLKDQFDAIDIDKSGSISIEEMRHALAKDLPWRLKGPRVLEIIQAIDSNTDGLVDFKEFVAATLHIHQMAELDSERWGIRCQAAFSKFDLDGDGYITPEELRMHTGSKGSIEPLLEEADIDKDGKISLSEFRKLLRTASMSNVPSPRGPPNPQAL

SEQ ID NO: 72787 - protein, 338 aa, Zea mays
  Clone ID: LIB3354-066-B6_FLI.pep
VDVSGGLDEAATSGLEDSEAASEGSTAQDFYTDVETESSGSSSDEQRAEFGFSLPPPEQVSNKADWKNDTSEVKSSDRMIPIAQRTRVLSSGAAILPHPSKVATGGEDAYFIAANGWFGVADGVGQWSFEGINAGLYARELMDGCKKFVTENQGAPDLRPEQILSKAVDEACSPGSCTVLVAHFDGQALQALNIGDSGFIVIRNGEVFKKSKPTLYGFNFPLQIQKGDDPSKFVQNYAIDLEDGDAIVTATDGLFDNVYEHEIAGIVSKSLQADLEPAEIAEHLAVKAQEVGRSGAGRSPFSDAALSAGYLGYSGGKLDDIAVVVSIVRTEIQEDRLR

SEQ ID NO: 72788 - protein, 106 aa, Zea mays
  Clone ID: LIB3587-197-D4_FLI.pep
ETGNDAAEFILLGADTVQVCTGVMIHGYPLVKKLCAELQDFMREHNFSSIEEFRGASLPYFTTHTDLVHRQQEAVRQRKAIKKGLQSDKEWTGDGFVKETESMVSN

SEQ ID NO: 72789 - protein, 188 aa, Zea mays; identical to SEQ ID NO: 44958
  Clone ID: LIB3689-257-H3_FLI.pep

SEQ ID NO: 72790 - protein, 608 aa, Zea mays; identical to SEQ ID NO: 59912
  Clone ID: LIB4602-005-A6_FLI.pep

SEQ ID NO: 72791 - protein, 237 aa, Zea mays
  Clone ID: LIB3732-003-C9_FLI.pep
PPPPPGRNVTRSPPSMAPRNALPAASAVANGMVMEPRFRGVRKRPWGRFAAEIRDPARKARVWLGTFDTAEAAARAYDAAALHFRGPKAKTNFPVAFAALPPPPPPKKPAAVTVSPSSSSTVESSSSSSRDSPATPPRPASPSQQAPSLDLSLGGTPAMVAAQPFLFLDPRLAVTVAVPAPVPYRPTAVAAGANKHAAASCREEEQSDTGSSSSVVDASPAVGVGFDLNMPPPAEVA

SEQ ID NO: 72792 - protein, 84 aa, Glycine max
  Clone ID: 700660662_FLI.pep
NQTYNKTRGICLTENSFMCYYFSNTKQRIRTSILEMNSLLGGSTTASKAEVLDTVVSITEAALVHHRTARKSQCLWSFIHILHI

SEQ ID NO: 72793 - protein, 190 aa, Zea mays
  Clone ID: LIB3115-016-B10_FLI.pep
AMPPLSLRRQKQPRSRCARSSPSGSSACRATASASPRRSSSSTVSPSRRGACVTSRRTWPSSLPPYFSLPSSRRASDAPSGSRRNRPPGRGAECGPPCGRCPPPSAARSPTAWPRSCRRRWPSSSGALPRPSASSVCVCLCSAETNSIKRSATTMPPATATEGPLPRLVLLMNWSKAFRFRGARNYKEFF

SEQ ID NO: 72794 - protein, 471 aa, Glycine max
  Clone ID: LIB4391-021-A5_FLI.pep
AGSTEVMALNLPSPAQVKPLFFSSNNSTKLPGSFSLKRKDSDTTVERRVYCSAAAQSPPPAWPGTAIPEPSDFKTWDGQKPISVLGSTGSIGTQTLSIVAEFPERFKVVSLAAGSNITLLADQIKTFKPEVVGLRNESLIDELKEALADVDHKPEIIPGEQGVIEAARHPDATTVVIGIVGCAGLKPTVAAIEAGKDIALANKETMIAGAPFVLPLAHKHNIKILPADSEHSAIFQSIQGLPKGALRKILLTGSGGAFREWPAEKMKDIKLADALKHPIWSLGRKITIDSATLFNKGLEVIEAHYLFGASYDDIEIVIHPQSIIHSLVETQDSSVIAQLGIPDMRLPLLYTLSWPERIYCSEVTWPRLDLSKYGSLTFYAPDDKKFPSVNLCYAAGRAGGTMTGVLSAANEKAVEMFVEEKISYLDIFKVVELTCQEHQKELVASPSLEEIIHYDQWARQYAASLQKASSV

SEQ ID NO: 72795 - protein, 47 aa, Zea mays
  Clone ID: 700572139_FLI.pep
RWHASITTIPLVSNSGFSKRTGARFVNVTLLPLAHSVLDSNRSISSL

SEQ ID NO: 72796 - protein, 223 aa, Glycine max
  Clone ID: LIB3093-042-C4_FLI.pep
MTRAFRILGSADNATSLAAVAAPPEAVALESDFVVILAALLCALICVVGLVAVARCAWFRQGSGGGSSPRQALANKGLKKKVLQSLPKFAYVDSNPSKWVATSECAICLADFAAGDEIRVLPQCGHGFHVPCIDTWLGSHSSCPSCRQILAVTRCQKCGRFPATGAGASRTPATEPELKSREDNNVASNSSNNINNNSDSGGNNSNCNIEHHHSHHVNSGFLP

SEQ ID NO: 72797 - protein, 597 aa, Zea mays
  Clone ID: LIB4980-057-B2_FLI.pep
QAAAGDARREPQSEQATMCGILAVLGVAEVSLAKRSRIIELSRRLRHRGPDWSGLHCHEDCYLAHQRLAIIDPTSGDQPLYNEDKTVVVTVNGEIYNHEELKAKLKTHEFQTGSDCEVIAHLYEEYGEEFVDMLDGMFSFVLLDTRDKSFIAARDAIGICPLYMGWGLDGSVWFSSEMKALSDDCERFITFPPGHLYSSKTGGLRRWYNPPWFSETVPSTPYNALFLREMFEKAVIKRLMTDVPFGVLLSGGLDSSLVASVASRHLNETKVDRQWGNKLHTFCIGLKGSPDLKAAREVADYLSTVHHEFHFTVQEGIDALEEVIYHIETYDVTTIRASTPMFLMSRKIKSLGVKMVISGEGSDEIFGGYLYFHKAPNKKEFHEETCRKIKALHLYDCLRANKATSAWGVEARVPFLDKSFISVAMDIDPEWKMIKRDLGRIEKWVIRNAFDDEERPYLPKHILYRQKEQFSDGVGYSWIDGLKDHASQHVSDSMMMNAGFVYPENTPTTKEGYYYRMIFENSFPSLQQGQLFLEVLVWPAALPKLLNGMHPGPRTLILLGVLLWVFTMLRMKTLQGKLLPLLILSQTRAFVQLLAKA

SEQ ID NO: 72798 - protein, 490 aa, Homo sapiens; identical to SEQ ID NO: 72781
  Clone ID: LIB4803-046-G4_FLI.pep

SEQ ID NO: 72799 - protein, 630 aa, Zea mays
  Clone ID: 700205810_FLI.pep
VPPFLAPKPVGDYNKGMAEADQKILSAEVKLESQYYFYMETQVALAIPDEDNCITIYSSTQIPEVTQNVVAKCLGIPFHNVRLISRRVGGGFGGKAMKAIHVACACAVAAFKLRRPVRMYLDRKTDMIMAGGRHPMKVKYSVGFKSDGKITALHIDLGINAGISPDVSPMLPPAIIGALKKYNWGNLAFDTKVCKTNVSSKSAMRGPGDVQGSFIAEAIIEHVASALSVDTNTIRRKNLHDFESLVVFFEDAAGEASTYSLVTMFDKLASSPEYQRRTAMVEHFNRSNKWKKRGISCVPITYEVNLRPTPGKVSIMNDGSIVVEVGGVEIGQGLWTKVKQMTAFGLGQLCPDGGESLLDKVRVIQADTLSMIQGGFTGGSTTSETSCEAVRQSCVALVERLKPIKENLEAEAGTVEWSSLIAQASMASVNLSAHAYWTPDPTFRSYLNYGAGISEVEIDVLTGATTILRSDLVYDCGQSLNPAVDLGQVEGAFIQGVGFFTNEEYTTNSEGLVIHDGTWTYKIPTVDTIPKQLNVELINSARDQKRVLSSKASGEPPLLLAASVHCAMREAIRAARKEFSVCTGPANSAITFEMDVPATMPIVKELCGLDVVERYLESMSTAGPTTTAKA

SEQ ID NO: 72800 - protein, 676 aa, Zea mays
  Clone ID: 700215729_FLI.pep
VVRSAQPNRRNRPPFTPPPPPDPSASPRNRLSVRPESGERVAAVEMESLAQRAALLRESLQKSQQVTDAVVSILGSFDSRLTALDSAMRPIQVRTHAVRTAHENIDRTLRSADVILTQFDRTREAEREIQKGPHENLQGFLDAVDRLRSIERFFSSNRSYRSSDGVLNHVNALLSKALVRMEGEFQNQLSQRSKPMEPDRLFDCLPSTLRPSSESQPEGGKNPSENQQNPEAVVYSPPALIEPKFVPLLSKLAQQLVQAGCQQQCSEIYSEARSSALESSLKNLGVEKLSKDEVQKMPWEILESKIGNWIHFMRIAVKLLFAGERQLCDQVFECSQSLRDKCFAAITKNSLATLLSFGEAIAMSKRSPEKLFVLLDMYEIMCELQTEIDTIFVGESGSQMRDSALSLTKCLAQTAQKTFSDFEEAVEKDATKNIHTDGTVHPLTSYVINYVKFLFDYQSTLKQLFQEFKEDGTGSELAAVTMKIMQALQNNLEAKAKQYKDPALMHIFLMNNIHYIVKSVRRSEAKDLLGDDWIQRHRRIVQQNANQYRRIAWAKVLQCLSGQGLTSSGGSGHVGSDGGNSSGASRTAVKERFRSFNVLFEEIYHKQCGWSVPDTELRESLRLAVAEILLPAYRSFIKRFGPLIENSKAPGKYVKHTPEQLELLLGNLFEGKQERA

SEQ ID NO: 72801 - protein, 391 aa, Zea mays
  Clone ID: LIB4569-004-B1_FLI.pep
EASSAPPRPPQSNPIQTARPPCPCQASRAQPPRASCPVLHAMAQKETNGSNGDHISTRPPPTPSPLRFSKFFQANLRILVTGGAGFIGSHLVDKLMENEKHEVIVADNFFTGSKDNLKKWIGHPRFELIRHDVTEPLLVEVDQIYHLACPASPIFYKHNPVKTIKTNVIGTLNMLGLAKRVGARILLTSTSEVYGDPLEHPQTEAYWGNVNPIGVRSCYDEGKRVAETLMFDYHRQHGIEIRIARIFNTYGPRMNIDDGRVVSNFIAQAVRGEPLTVQRPGTQTRSFCYVADMVDGLIKLMNGNKTGPINLGNPGEFTMLELAENVKELINPDVTVTMTENTPDDPRQRKPDITKAKEVLGWEPKIVLRDGLVLMEDDFRERLTVPKKTKA

SEQ ID NO: 72802 - protein, 391 aa, Zea mays
  Clone ID: LIB3239-024-D11_FLI.pep
GRLGRLRRGGRGDHRRGRGGVRGGVREEDRVGQRHRVGVRHGDGGRGDGVPDAHQGVAVPLLLHLPARLHRHRPHQPDGAAVPGAPLVDGFPGDLLLPEQPAVREHVPAPAAARGVHQHHDVPVHGHLPHLLHDGAGAVVRDGALHRAAAHHHVLRVPGHRAGHAADPGRPGGEVGGRDGVRVVQERAVLDDGQLLRVPGRGVPGAGEGGVQAGHLVQADVEAARGGREEGPLRRPVRGALDLAHGDAHHHHPRQHHRLRRGLRQGAGRRVDALAQGGRRRLLQLLGALPPLPFRQGHPGEARQDPRGGARLVGLHLRHHRRAVHQHPPHPRARRQARRRDRKARRRRTPPWQEVRRLLPLAVKRRAASIVMHAHIPPALMVTMVSRQGED

SEQ ID NO: 72803 - protein, 622 aa, Zea mays
  Clone ID: LIB4702-003-B5_FLI.pep
LATMATNPGLFTEWPWKKLGNFKYLLLAPWVAHGGYQAATKGWRAADLGYVAILPSLLLRALHNQAWITASRLQSARGRRQVVDRGIEFEQVDRERNWDDQILLSGILLYLGSTYLPGGQHLPLWRADGAALIALLHTGPVELVYYWLHRALHHHFLYSRYHSHHHASIVTEPITSVIHPFAELVAYELLFSIPLIVCTLNGTASIIAFEIYVIYIDFMNNMGHCNFELVPNWLFKWFPPLKYLMYTPSFHSLHHTQFRTNYSLFMPFYDYIYNTMDKSSDTLYEKSLKGKEETADVVHLTHLTSLHSIYHMRPGFAEYASRPYTAKWYVRMMWPMSWLSMVLTWSYGSSFTVERNVMKKLKMQSWVIPRYSFHYGLSWEKEAINSLVEKAICEADKKGAKVVTLGLLNQAHNLNRNGELYLQKCPKLGVRLVDGTSLAAAVVVNSVPQGTDQVVLAGNISKVARAVAAALCRKNIKVVMTNKQDYHFLKPNMAEDAAENLLFSKTTTAKVWLIGDGLDASEQFKAQKGTQFIPYSQFPPRMARKDTCTYSTTPAMVVPKTLQNVHSCENWLPRRVMSAWRIAGMVHALEGWNEHECGDIVLDMEKMWSGALLHGFRPVAQV

SEQ ID NO: 72804 - protein, 441 aa, Zea mays
  Clone ID: LIB4725-024-E6_FLI.pep
NPKGAQVMLGDQRMILGLDSATSSSTAPDLTRAEEDPSVSRSCVIDRLQVGWAQKGGQVEGLVNCYSKKNKTGSGSRNLAARAWSSEMEGSDEGGEVNTGDLIGGIGRELAISCLLRLPRSYYYDVACVNRSFYSLVRFGELYRLRREAGIVEQMIYCSCNVLEWEGFDPRRQRWFSIPSMPPIECFTLADKESLAVGTNILVFGKRVEAHVVLRYSLLTNSWTTGEMMNTPRCLFGSASFGEKAIVAGGIGQNGTLDSAELYDSEMQTWTTLPSMNRARQMCSGFFMDGKFYVIGGKSERHNEILSCAEDFDLESSTWRLIPDMAQGLNGGSGAPPLVAVVNNELYAADYATREVRKYDKESNAWITLGLLPGRYTSVHGWGIAFRSCGNMLIVIGAMSAGGSGVIEICSWVPNNGLPDWKIIGTRRSGSFVYNCAVMSC

SEQ ID NO: 72805 - protein, 258 aa, Zea mays
  Clone ID: LIB3245-093-G9_FLI.pep
CFSLCGLCSGKVKIRPPAKTKIPPPPVVAYQPDCIQIVPFLAHFVFSSDDVFAPSLAPLIIIINIMKVTVIGLGFVKAEGVVNSMTRHGDRRELLKGPLYYACAITLTTIVFWRTSPISIAVICNLCAGDGVADIAGRRFGHVKLPHNPEKSYAGSIAMFLAGFIASVLFMCYFNIFGFVEKSWSMVAAFGVISLAAAVVESLPISTRLDDNLTVSVASVLVGALVFYSIGARNLCCMSSEVRRSIPATVGMVFAGSS

SEQ ID NO: 72806 - protein, 133 aa, Zea mays
  Clone ID: 700100760_FLI.pep
GPWGGRPPPSAPSSEPTGLFFTSSSVLPPPPVQFSSVQLSCGSDRSPLHSTGSGTVISAVLAVWNACFSVVSTCTICNVSLLLPFRVFVWYLWYCKVHGHDRQGKHMYTPLEGCALRLCPSLEDRSCMYFSPI

SEQ ID NO: 72807 - protein, 281 aa, Zea mays
  Clone ID: LIB3607-053-A1_FLI.pep
SITSDINSLPGRASRNRAAQFQFHGQGALLLLPRPQRQARRLPARLVVLVSLVPVPVREEGVAAGRGRDGARLPQVRRERRRPDLAVRAGGAVRERGPRGHRRRGVAHDGGGRRGRRRLHQPARVRGAHGLGVRRRRRRRGGPAPRLLGLRRRRQRPHHARRARARPARPRRVRLRRPVPPHDPGRRPQRRRTRVLRRVQAHDGRRIRQDRCLGTRILPCSAPHKKIGFISFYVHICPIDHTGITEMFPRSRLFARPAAAHKKPPFYLLVWMFKRIVLASS

SEQ ID NO: 72808 - protein, 875 aa, Zea mays subsp. mexicana
  Clone ID: UC-ZMFLTEOSINTE096D04_FLI.pep
IMAIALANGGNKPPDWQDFVGIITLLIINSTISFIEENNAGNAAAALMARLAPKAKVLRNGRWTEEESAILVPGDIISVKLGDIIPADARLLEGDPLKIDQSALTGESLPVTKGPGDGVYSGSTCKQGEIEAVVIATGVHTFFGKAAHLVDSTNQVGHFQKVLTAIGNFCICSIAVGMLVELVVMYAIQHRAYRPGIDNLLVLLIGGIPIAMPTVLSVTMAIGAHRLAQQGAITKRMTAIEEMAGMDVLCSDKTGTLTLNKLTVDKSLVEVFQRGVDQDTVILMAARASRTENQDAIDATIVGMLADPKEARAGVQEIHFLPFNPTDKRTALTYLDGEGRMHRVSKGAPEQILHLAHNKSDIERRVRAVIDKFAERGLRALGVAYQEVPDGRKESPGGPWQFIGLLPLFDPPRHDSAETIRRALNLGVNVKMITGDQLAIGKETARRLGMGTNMYPSSALLGQNKDESIASLPIDDLIEKADGFAGVFPEHKYEIVKRLQARKHICGMTGDGVNDAPALKKADIGIAVADSTDAARSASDIVLTEPGLSVIISAVLTSRAIFQRMKNYTIYAVSITIRIVLGFMLLALIWKFDFPPFMVLIIAILNDGTIMTISKDRVKPSPQPDSWKLAEIFATGVVLGGYLAMMTVIFFWAAYKTDFFPRLFHVESLEKTAQDDFQKLASAVYLQVSTVSQALIFVTRSRSWSFVERPGFLLVFAFLVAQLIATLIAVYANWAFAAIKGIGWGWAGVIWLYNIVFYFPLDIIKFLIRYALSGRAWNLVLEQRIAFTSKKNFGTEERERKWAHAQRTLHGLQPPEASIFENKTTFNELNQLAEEARRRAEMARLREVSTLKGRMESVVKQKGLDIETIQQSYTV

SEQ ID NO: 72809 - protein, 214 aa, Zea mays
  Clone ID: 700151493_FLI.pep
TTRLFFSAPPEAEEERGAARSCAPPRSPRSCGNMGLTFTKLFSRLFSKKEMRILMVGLDAAGKTTILYKLKLGEIVTTIPTIGFNVETVEYKNISFTVWDVGGQDKIRPLWRHYFQNTQGLIFVVDSNDRDRVVEAKDELHRMLNEDELRDAVLLVFANKQDLPNAMNAAEITDKLGLHSLRQRHWYIQSTCATTGEGLYEGLDWLSNNIANKA

SEQ ID NO: 72810 - protein, 245 aa, Arabidopsis thaliana columbia
  Clone ID: JC-ALXLIB327436P4G04_FLI.pep
MAKVSFKDSLKALEADIQHANTVALDYPREKDGARVQMRLSYTPAAQFLLFLVQWTDCHLAGTLGLLRVLIYMTYADGKTTMSVYERKTSIKDFYAVIFPSLLQLERGITDLDDRKQKEVCKIRYRNKDETEKVKLSEIDIEREEECGICMEMNNMVVLPNCTHSLCIKCYRDWHGRSESCPFCRDSLKRVNSGDLWMLMEKSDTVNMYTIERENKKRLFVYIEKLPLVVPDQVFASSPYDCHVK

SEQ ID NO: 72811 - protein, 247 aa, Homo sapiens
  Clone ID: LIB3547-119-E9_FLI.pep
LPPRGPATFGSPGCPPANSPPSAPATPEPARAPERVMANAGLQLLGFILAFLGWIGAIVSTALPQWRIYSYAGDNIVTAQAMYEGLWMSCVSQSTGQIQCKVFDSLLNLSSTLQATRALMVVGILLGVIAIFVATVGMKCMKCLEDDEVQKMRMAVIGGAIFLLAGLAILVATAWYGNRIVQEFYDPMTPVNARYEFGQALFTGWAAASLCLLGGALLCCSCPRKTTSYPTPRPYPKPAPSSGKDYV

SEQ ID NO: 72812 - protein, 600 aa, Zea mays
  Clone ID: LIB143-070-E8_FLI.pep
TEPSLFFFRIYLEPSPNHSSSSESSSNPGFGHNLQATAPSCGPWILELLFSNSFAHGCSRGDATLHSLEHPVVEIGARPLLMLQRLHAVDPLLPLDPLHVGQHAAACEVPRERVGDERVGVEPGERDELPDVAEARDARDEGGHLGVRHPRRVPVEGRREVVGEHRLGARRLDALGEGGALGHVGAGRLHPQHVGVRREGAAPDHGRRHGPPEAVEPFPGPRQVPVPEHGRDAEAGGDVARLVVGHAPVVAAGGAVPLLEPALLLLARDAEARDGVPDALGEGLEPRRGQPLVLDGLELPAALARRHAGRQHGREALAPEARVGGADYELVVARVDVGLDERGGDGVGARDEDGLDAHDVELEPRGDEAVHVLGDGDEHLARHVAALLGDGGLVLEVDPGRPALHEELAELDGGRGAAEARVAVGDDGLEEVDVRRPRALGAGQRHARLPLLAVVVDLREEEVLHLVGHGVVGVVGEVRAGLVGGGVRGRALPPGDVDGVQVLGHHGDLDGVERAEGAGGGAAGLVRLERAPQLLGHLPRRVALPERAPEEDHVAGGVGALGEPEPLRAPPRLHLRHLRLEPPFLLHDQRRHGERRRHGW

SEQ ID NO: 72813 - protein, 823 aa, Zea mays; identical to SEQ ID NO: 53296
  Clone ID: LIB4172-051-C3_FLI.pep

SEQ ID NO: 72814 - protein, 449 aa, Zea mays
  Clone ID: LIB3689-237-D5_FLI.pep
RAAPQRSTQRARAAAMASAASGGGGSLKRMGPLRVQYYIVMGAVAAAVVLATLRYMPGPAVPATTARTSGGGVVRSAPAAAAVPVPVPAVEVETGEDEQAQRRRRRRKKKGDGVVLFNFGDSNSDTGGVAAVMGIRIAPPEGRAYFHHPTGRLSDGRVILDFICESLGMPHLSPFMKPLGSNFSNGVNFAIAGSTAMPGVTTFSLDVQVDQFVFFKERCLDSIERGESAPIVEKAFPDAIYTMDIGHNDINGVLHLPYHTMLENLPPVIAEIKKAIERLHENGARKFWIHGTGALGCMPQKLSMPRDDDSDLDEHGCIASINNVCKKFNSLLSEALDELRLTLKSSTIVFVDMFAIKYDLVANHTKYGIEKPLMTCCGHGGPPYNYDPKESCMTSDKYLCKLGEKFISWDGVHFTDAANGIVASKVLSGEYNIPRVKLASLVPVPKSDD

SEQ ID NO: 72815 - protein, 198 aa, Zea mays
  Clone ID: LIB4185-033-C2_FLI.pep
AALVRLRLGGLLLAALPLRDGVLHAQKEEQSSDQRQILGELRKEACKFCLLHIVVVEVMDDRSDQSKVQQQEISTERAAQNKKEASKTLKTNCSSNHMLQLNVWHSYSQMSRYIFDKHVEFGPKGLSCWSTISTEFIKLLVGGEEESGDEEHPPDEGHEPHLGNGGEATTGRGRGGASAAAMGTWPVELSRMLGSSLV

SEQ ID NO: 72816 - protein, 284 aa, Zea mays
  Clone ID: LIB4720-005-D4_FLI.pep
NPSRTALISASPSRRAASPPPGKMGRVIRAQRKGAGSVFKSHTHHRKGPARFRSLDFGERNGYLKGVVTDVIHDPGRGAPLAKVTFRHPFRYEHQKELFVAAEGMYTGQFVYCGRRATLSIGNVLPLRGIPEGAVVCNVEHHVGDRGVFARASGDYAIVISHNPDNGTSRIKLPSGAKKIVPSSCRALIGQVAGGGRTEKPMLKAGNAYHKYRVKRNSWPKVRGVAMNPVEHPHGGGNHQHIGHASTVRRDAPPGQKVGLIAARRTGRLRGQAAATASKADKAT

SEQ ID NO: 72817 - protein, 286 aa, Zea mays
  Clone ID: LIB4570-011-C12_FLI.pep
SLGRPILGSAENIKSITKEDLENYIATHYTAPRMVITAAGNVKHEDIVGQAKKLFNKLSTDPTTTNMLVAKQPASFTGSEVRIIDDDMPLAQFAVAFNGASWVDPDSVALMVMQSMLGSWNKSTGGGKHMGSELVQKAAINDIAESVMSFNMNYKDTGLFGVYAVAKADCLDDLAFAIMHEMSKLSYRVTEEDVIRARNQLKSSIQLHLDGSTAVVEDIGRQLLTYGRRIPTPELFARIDAVDASTVKRVANRFIFDQDVAIAAMGPIQGLPDYNWFRRRTYMLRY

SEQ ID NO: 72818 - protein, 360 aa, Gossypium hirsutum
  Clone ID: LIB3165-020-G4_FLI.pep
VKREFLFTVIMALNLVSPPEIHSISFLGSTKSSSFSKLFPGGFVLKKDCGTTFGRKVQCSAQAPQPPPAWPGRAFPDPGRKTWDGPKPISIVGSTGSIGTQTLDIVAENPDKFRVVALAAGSNVTLLVDQVKTFKPQLVAVRNESLVNELKEALADMEQKPEVIPGESGVIEVARHPDAVSVVTGIVGCAGLKPTVAAIEAGKDIALANKETLIAGGPFVLPLAHKHKVKILPADSEHSAIFQCIQGLPEGALRRIILTASGGAFRDWPVDKLKEVKVADALKHPNWNMGKKITVDSATLFNKGLEVIEAHYLFGAEYDDIEIVIHPQSIIHSMVETQDSSVLAQLGWPDMRLPILYTMS

SEQ ID NO: 72819 - protein, 233 aa, Zea mays
  Clone ID: LIB4721-024-H12_FLI.pep
QFEALGSWGIAFTPHILTVKAGEDVASKIMTFSQQGPRTVCILSANGAISNVTLRQPATSGGLVTYEGRFEIISLSGSFLLAEDGDTRSRTGGLSVALAGSDGRVLGGCVAGMLMAATPVQVVVASFIAEGKKSKPAEARKVEPMAAPPPQMATFVPPPLATSPPSEGTSSASSDDSGSPIHHSAMPFSNSSQHQHPHQHQHQHMPPAYASGGWSLSVHQQNRHDSDMKMMSN

SEQ ID NO: 72820 - protein, 443 aa, Zea mays
  Clone ID: LIB3689-257-B9_FLI.pep
LSSFKIPLAKGKREKLGSSSRGISSLSVRLRLLNACLVSGEPWWHLCFMAEICCEAAAAGSDQKGECAGSRAARRRRMEIRRLRVVAEEASAKRRRLEADEEDAVGRRAPRYGVTSVCGRRRDMEDAVTARPEFINGHHFFGVFDGHGCSHVATSCGERMHQIVAEEATAAAGSSVSDETARWRGVMEKSYARMDAEAVVSRETAGPAPTCRCEMQLPKCDHVGSTAVVAVVGPRHLVVANCGDSRAVLSSGGATIPLSADHKPDRPDELERIHAAGGRVIFWDGARVFGMLAMSRAIGDSYLKPFVISDPEVRVVERKDGEDEFLILASDGLWDVVSNEVACKVVRTCLRNRAPRGGREQSSPTSNLSPRQSSASGGSSSSSGDEEAGAPSGDGAGSESDGESGEDRACAEAAILLTKLALARQSADNVSVVVVNLRRRPRS

SEQ ID NO: 72821 - protein, 246 aa, Oryza sativa
  Clone ID: UC-OSFLM202103G12_FLI.pep
QQWRRRRRRGLLADGGDAGGEDVQLPERAGGRGVRVRGAQRGAGDPGNDPVDAGAAVQGADVARRRAGLRRGGRLLPPRGVRGVLRVRQRRGRQRAHHAGAAGVADRRRQHIRRRARRRQLPDLRHAGVRHARDLPRQEAPLQTRHASPPHRPITLRLVHHVRCHRRPFLWWIARLLWWLCVCSNDLLLAMHYVAVDHEAKEVWLVLVHQLVLHHHRRSSVGVRTNRRSPLDHRECPELQVLLVSD

SEQ ID NO: 72822 - protein, 453 aa, Arabidopsis thaliana columbia
  Clone ID: JC-ATXLIB327407P2D04_FLI.pep
FVAVEETSGGKRREIELVVGGEDEVEEDRRRSRRRHVFEGLDLSEIEMKTEKKERGEEVGRMSICSPPKNALLLMRCRSDPVKVAALANRVRERQLSLNDGVYTEEEEDERRRRFELEIEDKKRIDLCEKWISGETTVETEEVSVAVAEAEAEAEAEAPLPSNPATEEEERVKVVEDSIVEEEQEASKILDSFEEEIEATIMKKIEDEIRNAIEEEEKLAEMEELAVVAVAETEEVEESKEVVPDCIPQNEERSEQGNREPDPSPEVVMRRSLQEETTEKEKTTATPYKVLPDCLLLMMCEPKLSMEVSKETWVCSTDFVRCLPGRPPAKKIPPEAVGDNHHHHQPKKRIVTAVDSNASSRRRSIDRPPLHLQPPRSSCSYPAAPPIITAAAAVGEQRVAGANKVQPPVLPRCKSEPRKSASKLAPEACFWKNRKLEPHPPATVGVGGAGVGF

SEQ ID NO: 72823 - protein, 617 aa, Arabidopsis thaliana columbia
  Clone ID: JC-ATXLIB327411P3A08_FLI.pep
SGKRLLLFFAMGVDELSHLKFSLLLESSACNDLSGFKSLVEEEGLESIDGSGLWYGRRLGSKKMGFEERTPLMIAALFGSKEVVDYIISTGLVDVNRSCGSDGATALHCAVSGLSANSLEIVTLLLKGSANPDSCDAYGNKPGDVIFPCLSPVFSARMKVLERLLKGNDDLNEVNGQEESEPEVEVEVEVSPPRGSERKEYPVDPTLPDIKNGVYGTDEFRMYAFKIKPCSRAYSHDWTECPFVHPGENARRRDPRKYHYSCVPCPEFRKGSCSRGDTCEYAHGIFECWLHPAQYRTRLCKDETNCSRRVCFFAHKPEELRPLYPSTGSGVPSPRSSFSSCNSSTAFDMGPISPLPIGATTTPPLSPNGVSSPIGGGKTWMNWPNITPPALQLPGSRLKSALNAREIDFSEEMQSLTSPTTWNNTPMSSPFSGKGMNRLAGGAMSPVNSLSDMFGTEDNTSGLQIRRSVINPQLHSNSLSSSPVGANSLFSMDSSAVLASRAAEFAKQRSQSFIERNNGLNHHPAISSMTTTCLNDWGSLDGKLDWSVQGDELQKLRKSTSFRLRAGGMESRLPNEGTGLEEPDVSWVEPLVKEPQETRLAPVWMEQSYMETEQTVA

SEQ ID NO: 72824 - protein, 507 aa, Arabidopsis thaliana columbia
  Clone ID: JC-ATXLIB327414P1A02_FLI.pep
RNTKMKCPYCSSAQGRCTTTSSGRSITECSSCGRVMEERQTQNHHLFHLRAQDTPLCLVTSDLQTAAQPSPEDEEDPFEPTGFITAFSTWSLEPSPIFARSSLSFSGHLAELERTLELASSTSNSNSSTVVVDNLRAYMQIIDVASILGLDCDISEHAFQLFRDCCSATCLRNRSVEALATACLVQAIREAQEPRTLQEISIAANVQQKEIGKYIKILGEALQLSQPINSNSISVHMPRFCTLLQLNKSAQELATHIGEVVINKCFCTRRNPISISAAAIYLACQLEDKRKTQAEICKITGLTEVTLRKVYKELLENWDDLLPSNYTPAVPPEKAFPTTTISTTRSTTPRAVDPPEPSFVEKDKPSAKPIETFDHTYQQPKGKEDKQPKFRQPWLFGTASVMNPAEMISEPAKPNAMDYEKQQLDKQQQQQLGDKETLPIYLRDHNPFPSNPSPSTGISTINWSFRPSVVPGSSSNLPVIHPPKLPPGYAEIRGSGSRNADNPHGDF

SEQ ID NO: 72825 - protein, 687 aa, Arabidopsis thaliana columbia
  Clone ID: JC-ATXLIB327423P2H06_FLI.pep
LIVMRALNSRLVLIDINSSWQASRRLISATATAFSSDSSSSFRRTRGARQRIASSKSPASSPSPVRRPSDGFSFDVRSPSSDSSISSRKSPTTAPPTVELDAFLEILPPATRKELVKHEAIEELIEVVMDLGRKPLARFPSGDWVISEQPVTHQDLELAVSKVGDFSDDNRSGIDRSLHRISAIRNRKLQVIGLTCRVGRVVSGSAEIIRDLIEGGGSILVIGSPGVGKTTLIREIARMLADEHRKRVVIVDTSNEIGGDGDVPHSGIGRARRMQVPNVNLQHDVMIEAVENHMPETIIIDEIGTELEALAASTIAQRGVQLVATAHGMTIDNIIKNPSLQILIGGIESVTLGDEEARKRKVQKTILERKGPPTFTCAVEMISRTECRVHQRLDVTVDAILAGKSAPFEIRQIRGEDDVPHKLVTPIPLENLEEEPAPLLNRDFVSELLSDDEDEDFLLIRSNKARSNTYTSPRSSPVHVYTYNVLEADLLQVAEVMGLDDEIEVTDDVGEADVILASSSELKQNSSIRRVAKLHKLPIFVIKSTTMAQMVKAVRMILGRESFGSAPKAIEKSSVDDIEIKDDAPESKPSLEELDALEEVRLAIEYIVIPGGEPVELLPRRSDIIVRQLELVESYQLAVENLGTHLNPRLQILPRRSTKKTLTSSSPQKSADGSMGTTGTRLPFLKD

SEQ ID NO: 72826 - protein, 797 aa, Arabidopsis thaliana columbia
  Clone ID: JC-ATXLIB327440P1F12_FLI.pep
AMGCAASKLDNEDAVRRCKDRRRLMKEAVYARHHLAAAHADYCRSLRITGSALSSFASGEPLSVSDQTPAVFLHTPPPPLSEQSPAKFVPPRFSPSPAPSSVYPPSTSPSVASSKQPSVMSTSSNRRRKQQPKPRLPHILSESSPSSSPRSERSNFMPNLYPSAYQNSTYSATPSHASSVWNWENFYPPSPPDSEFFNRKAQEKKHNSDNRFNDEDTETVRSEYDFFDTRKQKQKQFESMRNQVEEETETEREEVQCSEWEDHDHYSTTSSSDAAEEEEEDDDRESISEVGTRSEFGSTVRSNSMRRHHQQPSPMPQVYGGAEQSKYDKADDATISSGSYRGGGDIADMKMVVRHRDLKEIIDAIKENFDKAAASGEQVSQMLELGRAELDRSFSQLKKTVIHSSSLLSNLSSTWTSKPPLAVKYRIDTTALDQPNSSKSLCSTLDRLLAWEKKLYEEIKAREGFKIEHEKKLSQLQSQEYKGEDEAKLDKTKASITRLQSLIIVTSQAVTTTSTAIIRLRDTDLVPQLVELCHGFMYMWKSMHQYHETQNSIVEQVRGLINRSGKGESTSELHRQATRDLESAVSSWHSSFSSLIKFQRDFIHSVHAWFKLTLLPVCQEDAANHHKEPLDAYAFCDEWKLALDRIPDTVASEAIKSFINVVHVISAKQADEHKIKKRTESASKELEKKASSVRNLERKYYQSYSMVGVGLPESGPDNQHMLDARDPLSDKKSELAVCQRRVEEEMVKYSKAIEVTRAMTLNNLQTGLPGVFQSLTSFSALFMESLQTVCTRSYSIK

SEQ ID NO: 72827 - protein, 296 aa, Arabidopsis thaliana columbia
  Clone ID: JC-ATXLIB327424P1D04_FLI.pep
QLPRLTRMWTHLERQSGGQVKGMGEKQIEVDKRILRTQIGVLKKELESVRKHRKQYRSRRVAIPVPVVSLVGYTNAGKSTLLNQLTGANVLAENRLFATLDPTTRRVQMQNGKEFLLTDTVGFIQKLPTTLVAAFRATLEEIAESSLLVHVVDISHPLAEQQIEAVEKVMSELDVSSIPKLVVWNKVDRVDDPQKVKLEAEETGDTICISALTGEGLDDFCNAVHEKLKDSMVWVEALLPFDKGDLLSTIHKVGMVKETEYTENGTLIRAHVPLRFAQLLKPMRHLVKDTSISQRG

SEQ ID NO: 72828 - protein, 371 aa, Arabidopsis thaliana columbia
  Clone ID: JC-ATXLIB327413P1F04_FLI.pep
RTRMTRPVPRIGDRRIRKILASRHWKGGSKNNTDAKPWYCSKRSYYLHHHQRSYPIKKRKYFDSVYDSNSDDYRLQGKTHKGSRTISSMKSRNASFVSRDHHVKLRIKSFRVPELFVEIPETATVGSLKRMVMEAVTTILGDGLRVGLMVQGKKVRDDGKTLLQTGISEENNHLDSLGFSLEPSLETTPQPLLSSYLSDHACDDVTLCHDNALDSSHEPEPSPADSFGKLGTSDHSRALIPVASAAMLAPRPPNRKFKRTEQQLAAQRRIRRPFSVTEVEALVQAVEKLGTGRWRDVKVRAFEDADHRTYVDLKDKWKTLVHTARISPQQRRGEPVPQELLDRVLKAHAYWSQHLMHQLQTEPPSTQVEAL

SEQ ID NO: 72829 - protein, 318 aa, Arabidopsis thaliana columbia
  Clone ID: JC-ATXLIB327432P3B08_FLI.pep
LQEISISRLFNLFLSSKSSYSTLLLQMGSSCLPPGFRFHPTDEELIEYYLKRKVEGLEIELEVIPVIDLYSFDPWELPDKSFLPNRDMEWYFFCSRDKKYPNGFRTNRGTKAGYWKATGKDRKITSRSSSIIGYRKTLVFYKGRAPLGDRSNWIMHEYRLCDDDTSQGSQNLKGAFVLCRVAMKNEIKTNTKIRKIPSEQTIGSGESSGLSSRVTSPSRDETMPFHSFANPVSTETDSSNIWISPEFILDSSKDYPQIQDVASQCFQQDFDFPIIGNQNMEFPASTSLDQNMDEFMQNGYWTNYGYDQTGLFGYSDFS

SEQ ID NO: 72830 - protein, 504 aa, Arabidopsis thaliana columbia
  Clone ID: JC-ATXLIB327431P2D12_FLI.pep
VLSLSLSFSFFIDLFLLGFFSASQRLKGFSKNRPAEKMSSSYNTIALSSTPTFLLSSAAAGPGPNNFNRQEAAMTMVQQQPTSSVAPPPKKRRNQPGNPNPDAEVIALSPKTIMATNRFLCEVCNKGFQREQNLQLHRRGHNLPWKLKQKSNKEVRRKVYLCPEPSCVHHDPARALGDLTGIKKHYYRKHGEKKWKCDKCSKRYAVQSDWKAHSKTCGTKEYRCDCGTIFSRRDSYITHRAFCDALIQESARNPTVSFTAMAAGGGGGARHGFYGGASSALSHNHFGNNPNSGFTPLAAAGYNLNRSSSDKFEDFVPQATNPNPGPTNFLMQCSPNQGLLAQNNQSLMNHHGLISLGDNNNNNHNFFNLAYFQDTKNSDQTGVPSLFTNGADNNGPSALLRGLTSSSSSSVVVNDFGDCDHGNLQGLMNSLAATTDQQGRSPSLFDLHFANNLSMGGSDRLTLDFLGVNGGIVSTVNGRGGRSGGPPLDAEMKFSHPNHPYGKA

SEQ ID NO: 72831 - protein, 155 aa, Glycine max
  Clone ID: 700786094_FLI.pep
QFNHHCTTQFPSSFSIKRAMARTKQTARKSTGGKAPRKQLATKAARKSAPATGGVKKPHRFRPGTVALREIRKYQKSTELLIRKLPFQRLVREIAQDFKTDLRFQSSAVSALQEAAEAYLVGLFEDTNLCAIHAKRVTIMPKDIQLARRIRGERA

SEQ ID NO: 72832 - protein, 274 aa, Arabidopsis thaliana columbia; identical to SEQ ID NO: 40743
  Clone ID: JC-ATXLIB327409P2G08_FLI.pep

SEQ ID NO: 72833 - protein, 880 aa, Arabidopsis thaliana columbia
  Clone ID: JC-ATXLIB327408P2F07_FLI.pep
LIAEKAERERKFERKRSGKLEESSMVTDDSNSSGRIKSHVDDDDDGEEEEDRLEGLENRLSELKRKIQGERVRSIKEKFEANRKKVDAHVSPFSSAASSRATAEDNGNSNMLSSRMRMPLCKLNGFSHGVGDRDYVPTKDVISASVKLPIAERIPPYTTWIFLDRNQRMAEDQSVVGRRQIYYEQHGGETLICSDSEEEPEPEEEKREFSEGEDSIIWLIGQEYGMGEEVQDALCQLLSVDASDILERYNELKLKDKQNTEEFSNSGFKLGISLEKGLGAALDSFDNLFCRRCLVFDCRLHGCSQPLISASEKQPYWSDYEGDRKPCSKHCYLQLKAVREVPETCSNFASKAEEKASEEECSKAVSSDVPHAAASGVSLQVEKTDIGIKNVDSSSGVEQEHGIRGKREVPILKDSNDLPNLSNKKQKTAASDTKMSFVNSVPSLDQALDSTKGDQGGTTDNKVNRDSEADAKEVGEPIPDNSVHDGGSSICQPHHGSGNGAIIIAEMSETSRPSTEWNPIEKDLYLKGVEIFGRNSCLIARNLLSGLKTCLDVSNYMRENEVSVFRRSSTPNLLLDDGRTDPGNDNDEVPPRTRLFRRKGKTRKLKYSTKSAGHPSVWKRIAGGKNQSCKQYTPCGCLSMCGKDCPCLTNETCCEKYCGCSKSCKNRFRGCHCAKSQCRSRQCPCFAAGRECDPDVCRNCWVSCGDGSLGEAPRRGEGQCGNMRLLLRQQQRILLGKSDVAGWGAFLKNSVSKNEYLGEYTGELISHHEADKRGKIYDRANSSFLFDLNDQYVLDAQRKGDKLKFANHSAKPNCYAKVMFVAGDHRVGIFANERIEASEELFYDYRYGPDQAPVWARKPEGSKKDDSAITHRRARKHQSH

SEQ ID NO: 72834 - protein, 256 aa, Arabidopsis thaliana
  Clone ID: JC-ATXP1C64A5T7_FLI.pep
WDLFFWEFIHSPAAMAKLSFKDSLKALEADIQHANTLALDYPREKDGARVQMRLSYSPTAQFFLFLVQWTDCKLAGFLGLLRVLIYMTYADGKTTMSVYERKASIREFQAVILPSLSQLQRGVTDIDDSKQKEVCKMRYRKKDESEMSEIEIEREEECGICMEMNSKVVLPNCTHSLCIKCYRDWRGRSQSCPFCRDSLKRVDSGDLWMFLDQNDTVNLTAIARENQKRLFMYIEKLPLVVPDQVYASSPYDFHVR

SEQ ID NO: 72835 - protein, 251 aa, Arabidopsis thaliana
  Clone ID: JC-ATXP11C97E11T7004_FLI.pep
HEGGLPNFDPQQYMQTMQQVMENPEFRTMAERLGNALVQDPQMSPFLEALGNPAASEQFAERMAQMKEDPELKPILAEIDAGGPSAMMKYWNDKDVLAKLGEAMGIAVGADQTVAAEPEEAEEGEEEESIVHQTASLGDVEGLKAALASGGNKDEEDSEGRTALHFACGYGEVRCAQVLLDAGANANAIDKNKNTPLHYAAGYGRKECVSLLLENSAAVTQQNMDNKNPIDVARLNNQLDVVKLLEKDAFL

SEQ ID NO: 72836 - protein, 89 aa, Arabidopsis thaliana
  Clone ID: JC-ATXP30C142L2T7_FLI.pep
LIKSLCWENVGVRTTITTFKDVDVYDVKYCACDKLRRQILSKDVSTKAGDFENFKKAKEKFMFNKKVGVSESFNGLSHELVLMLSSNLV

SEQ ID NO: 72837 - protein, 510 aa, Arabidopsis thaliana
  Clone ID: JC-ATXP31C147B23T7_FLI.pep
IPETPARSSRAIAPPELSPRIASEISMAPPAVVSQPIPKSNDSEKIWHYKDPSGKVQGPFSMAQLRKWNNTGYFPAKLEIWKANESPLDSVLLTDALAGLFQKQTQAVDNSYMKAQVAAFSGQSSQSEPNLGFAARIAPTTIEIPRNSQDTWSQGGSLPSPTPNQITTPTAKRRNFESRWSPTKPSPQSANQSMNYSVAQSGQSQTSRIDIPVVVNSAGALQPQTYPIPTPDPINVSVNHSATLHSPTPAGGKQSWGSMQTDHGGSNTPSSQNNSTSYGTPSPSVLPSQSQPGFPPSDSWKVAVPSQPNAQAQAQWGMNMVNNNQNSAQPQAPANQNSSWGQGTVNPNMGWVGPAQTGVNVNWGGSSVPSTVQGITHSGWVAPVQGQTQAYPNPGWGPTGHPQSQSQSQVQAQAGTTGSGWMQPGQGIQSGNSNQNWGTQNQTAIPSGGSGGNQAGYWGNQQQSQNGDSGYGWNRQSGGQQNNFKGQRVCKFFRENGHCRKGASCNYLHN

SEQ ID NO: 72838 - protein, 518 aa, Arabidopsis thaliana
  Clone ID: JC-ATXP34C153D10T7_FLI.pep
GSFRLIRVGWFLLNFRSFVSSIFDARKVFSATSNMRQRNMMTGSDMEQNSQSFVPHPEPRIGTNYLYPDIPPVNTVPHLEAHSLQEPYDNNSMFYGPPQYHHQHASNLGSGMSTAPNFYVPYVNYEAPPSFLLSHGSNGAVVGVTSTEHERNAHFMDHGFKRKSSEVIPGNSQYPVAPCSFPQLNTSETAPISFPHFGTYPQPLDQRSVRNRAGAATMDPLLSHGHNNFSQGNYAAHPFPPPGSVWYDQHCNGNRSDGSSSLWSQAPAVPYMHGNIATGSIDSGNVCFPRYHETSSSRNPTPSVYQRNHYISHHPVPPPPIAYPHMPSASYAETMHPTSYSHVGQVQSTGFRINQYPGEDFVPAAILRHRELPHFRAIPANEDAFWEVGYDAVNYVDHHQDMRLDIEDMSYEELLALSDQIGTVKTGLSSEDVKELLERRTSTRINLEEGPSTDLETDSCTICQENYKNEDKIATLDCMHKYHAECLKKWLVIKNVCPICKSEALVMEKKKKLRLSSR

SEQ ID NO: 72839 - protein, 240 aa, Arabidopsis thaliana
  Clone ID: JC-ATXP44C171F7T7024_FLI.pep
FRDFKGRRAGMIKALTTDVQEFFRLCDPEKENLCLYGHPNEHWEVNLPAEEVPPELPEPVLGINFARDGMAEKDWLSLVAVHSDAWLLAVAFFFGARFGFDKADRKRLFNMVNDLPTIFEVVAGTAKKQGKDKSSVSNNSSNRSKSSSKRGSESRAKFSKPEPKDDEEEEEEGVEEEDEDEQGETQCGACGESYAADEFWICCDLCEMWFHGKCVKITPARAEHIKQYKCPSCSNKRARS

SEQ ID NO: 72840 - protein, 256 aa, Arabidopsis thaliana
  Clone ID: JC-ATXP47C172M1T7_FLI.pep
KHINHKENREREMEDDNSNNTNNNNVIAPFIVKTYQMVNDPSTDWLITWGPAHNSFIVVDPLDFSQRILPAYFKHNNFSSFVRQLNTYGFRKVDPDRWEFANEHFLRGQKHLLNNIARRKHARGMYGQDLEDGEIVREIERLKEEQRELEAEIQRMNRRIEATEKRPEQMMAFLYKVVEDPDLLPRMMLEKERTKQQQQVSDKKKRRVTMSTVKSEEEEGKKMKGGSLGLCHHQYRRRHQRRIFTGIIHRMGGLFL

SEQ ID NO: 72841 - protein, 214 aa, Arabidopsis thaliana
  Clone ID: JC-ATXP49C178N3T7_FLI.pep
IDDKTCEERLWKMKHRGETNFYLCEITRDMVIDATHKGNKSRYINHSCNPNTQMQKWIIDGETRIGIFATRGIKKGEHLTYDYQFVQFGADQDCHCGAVGCRRKLGVKPSKPKIASDEAFNLVAHELAQTLPKVHQNGLVNRHIDAGKSWNNLSQRDTCSRNCIGVVIRLSRPTSDRCFGLVRHFDEYSRKHSVMFEDGVTEFVDMSREDWEIV

SEQ ID NO: 72842 - protein, 245 aa, Arabidopsis thaliana
  Clone ID: JC-ATXP71C222M6T7044_FLI.pep
SPLLHAAASNWTQHRTTKFALIIRGECSFEDKLLNAQNSGFQAVIVYDNIDNEDLIVMKVNPQDITVDAVFVSNVAGEILRKYARGRDGECCLNPPDRGSAWTVLAISFFSLLLIVTFLLIAFFAPRHWTQWRGRHTRTIRLDAKLVHTLPCFTFTDSAHHKAGETCAICLEDYRFGESLRLLPCQHAFHLNCIDSWLTKWGTSCPVCKHDIRTETMSSEVHKRESPRTDTSTSRFAFAQSSQSR

SEQ ID NO: 72843 - protein, 165 aa, Arabidopsis thaliana
  Clone ID: JC-ATXP89C245B19T7060_FLI.pep
KRSKRSRSDLHHNHRLTEEEYLAFCLMLLARDGGDLDSVTVAEKPSYKCGVCYKTFSSYQALGGHKASHRSLYGGGENDKSTPSTAVKSHVCSVCGKSFATGQALGGHKRCHYDGGVSNSEGVGSTSHVSSSSHRGFDLNIIPVQGFSPDDEVMSPMATKKPRLK

SEQ ID NO: 72844 - protein, 156 aa, Arabidopsis thaliana
  Clone ID: JC-ATXP96C248A10T7_FLI.pep
FIKSHKSSTLNHKSQSFGYQMARTKQTARKSTGGKAPRKQLATKAARKSAPATGGVKKPHRFRPGTVALREIRKYQKSTELLIRKLPFQRLVREIAQDFKTDLRFQSSAVAALQEAAEAYLVGLFEDTNLCAIHAKRVTIMPKDIQLARRIRGERA

SEQ ID NO: 72845 - protein, 261 aa, Arabidopsis thaliana
  Clone ID: JC-ATXP97C251A23T7_FLI.pep
ISLISLLEKLLAIMLSTAPAFSFSEPGLVNQFSGFQTGFTPWEWDCSDLFFVDQMSLEPAIPSPCYGESDTGSVKINSGSHDMKTGSDESCAGFVKINPRCDDADISNDLPCSQADEPDSDDTKQLTAITNFGSGENNHNRKKMIQPEMTDERKRKRMESNRESAKRSRMRKQSHIDNLREQVNRLDLENRELGNRLRLVLHQLQRVNSDNNRLVTEQEILRLRLSEMRRILIIRQLQQQQQWELHNRRMIMTEQNHPHLQ

SEQ ID NO: 72846 - protein, 142 aa, Arabidopsis thaliana; identical to SEQ ID NO: 40360
  Clone ID: JC-ATXP108C144I3T7089_FLI.pep

SEQ ID NO: 72847 - protein, 339 aa, Arabidopsis thaliana
  Clone ID: JC-ATXP118C144L6T7022_FLI.pep
SLLFCLSLVSSLHIINTKDFILFSIISKFLELGLFLDLFLELGFGLLFLLYLDMMMGQDEVGSDQTQIIKGKRTKRQRSSSTFVVTAATTVTSTSSSAGGSGGERAVSDEYNSAVSSPVTTDCTQEEEDMAICLIMLARGTVLPSPDLKNSRKIHQKISSENSSFYVYECKTCNRTFSSFQALGGHRASHKKPRTSTEEKTRLPLTQPKSSASEEGQNSHFKVSGSALASQASNIINKANKVHECSICGSEFTSGQALGGHMRRHRTAVTTISPVAATAEVSRNSTEEEIEINIGRSMEQQRKYLPLDLNLPAPEDDLRESKFQGIVFSATPALIDCHY

SEQ ID NO: 72848 - protein, 196 aa, Arabidopsis thaliana
  Clone ID: JC-ATXP124C121G24T7_FLI.pep
RTITNQSPKPNSTLNQRKPPLPNLSVSRTVSTKTEKEEEERHYRGVRRRPWGKYAAEIRDPNKKGCRIWLGTYDTAVEAGRAYDQAAFQLRGRKAILNFPLDVRVTSETCSGEGVIGLGKRKRDKGSPPEEEKAARVKVEEEESNTSETTEAEVEPVVPLTPSSWMGFWDVGAGDGIFSIPPLSPTSPNFSVISVT

SEQ ID NO: 72849 - protein, 237 aa, Arabidopsis thaliana columbia
  Clone ID: JC-ATXLIB327403P3G09_FLI.pep
SYLTTITLMDRMCGFRSTEDYSEKATLMMPSDYQSLICSTTGDNQRLFGSDELATALSSELLPRIRKAEDNFSLSVIKSKIASHPLYPRLLQTYIDCQKVGAPMEIACILEEIQRENHVYKRDVAPLSCFGADPELDEFMETYCDILVKYKTDLARPFDEATTFINKIEMQLQNLCTGPASATALSDDGAVSSDEELREDDDIAADDSQQRSNDRDLKDQLLRKFGSHISSLKLEFS

SEQ ID NO: 72850 - protein, 635 aa, Arabidopsis thaliana columbia
  Clone ID: JC-ATXLIB327411P1F05_FLI.pep
KRVFFYRSPVYGMTDYRLQPTMNLWTTDDNASMMEAFMSSSDISTLWPPASTTTTTATTETTPTPAMEIPAQAGFNQETLQQRLQALIEGTHEGWTYAIFWQPSYDFSGASVLGWGDGYYKGEEDKANPRRRSSSPPFSTPADQEYRKKVLRELNSLISGGVAPSDDAVDEEVTDTEWFFLVSMTQSFACGAGLAGKAFATGNAVWVSGSDQLSGSGCERAKQGGVFGMHTIACIPSANGVVEVGSTEPIRQSSDLINKVRILFNFDGGAGDLSGLNWNLDPDQGENDPSMWINDPIGTPGSNEPGNGAPSSSSQLFSKSIQFENGSSSTITENPNLDPTPSPVHSQTQNPKFNNTFSRELNFSTSSSTLVKPRSGEILNFGDEGKRSSGNPDPSSYSGQTQFENKRKRSMVLNEDKVLSFGDKTAGESDHSDLEASVVKEVAVEKRPKKRGRKPANGREEPLNHVEAERQRREKLNQRFYALRAVVPNVSKMDKASLLGDAIAYINELKSKVVKTESEKLQIKNQLEEVKLELAGRKASASGGDMSSSCSSIKPVGMEIEVKIIGWDAMIRVESSKRNHPAARLMSALMDLELEVNHASMSVVNDLMIQQATVKMGFRIYTQEQLRASLISKIG

SEQ ID NO: 72851 - protein, 284 aa, Arabidopsis thaliana columbia
  Clone ID: JC-ATXLIB327411P1H02_FLI.pep
YEEKIQMGLDDSCNTGLVLGLGLSPTPNNYNHAIKKSSSTVDHRFIRLDPSLTLSLSGESYKIKTGAGAGDQICRQTSSHSGISSFSSGRVKREREISGGDGEEEAEETTERVVCSRVSDDHDDEEGVSARKKLRLTKQQSALLEDNFKLHSTLNPKQKQALARQLNLRPRQVEVWFQNRRARTKLKQTEVDCEFLKKCCETLTDENRRLQKELQDLKALKLSQPFYMHMPAATLTMCPSCERLGGGGVGGDTTAVDEETAKGAFSIVTKPRFYNPFTNPSAAC

SEQ ID NO: 72852 - protein, 142 aa, Arabidopsis thaliana columbia
  Clone ID: JC-ATXLIB327413P1G12_FLI.pep
RNFDMKGGESKAEATSTDQRLKTRGRKAGKKTKKDPNQPKRPPSAFFVFLEDFRKEFNLANPNNKSVATVGKAAGARWKAMTDEDKAPYVAKAESRKTEYIKNVQQYNLKLASGTNREEDDSDKSKSEVDEAVSEEEAEDDD

SEQ ID NO: 72853 - protein, 346 aa, Glycine max
  Clone ID: uC-gmrominsoy196a10_FLI.pep
VDTMVPQSQPLVIHVPALPRNAQSFRWSGGSSSTNNHSSNSVMCADRNNLPNEEASSRSMPRNIIEYPMFVPATNLRNVVRNPARTSNNANLSIPGNVGSSSRTGSNPAVNPPPASAWVSRPNPQQYPRRLSEYVRRSLFSPGLEAAGSSSNSYTPFRGPPTSSESRGLSSGVNPFERQGDSEFGIPYSLQSLVVAGEGSSRLVSELRNVLGLMRRGGNLRFEDVMILDPSVFSGIADIHDRHRDMRLDVDNMSYEELLALEERIGNVSTGLSEEIVSKLLKKKKYSAEPDSQHEAEPCCVCQEEYKDGDDLGSLDCGHDYHRDCIKQWLMHKNLCPICKTTGLAT

SEQ ID NO: 72854 - protein, 236 aa, Oryza sativa
  Clone ID: UC-OSFLM202093A02_FLI.pep
TTKHAFATLSFIAETFLFLYVGMDALDIEKWEFASDRPGKSIGISSILLGLVLIGRAAFVFPLSFLSNLTKKAPNEKITWRQQVVIWWAGLMRGAVSIALAYNKFTRSGHTQLHGNAIMITSTITVVLFSTMVFGMMTKPLIRLLLPASGHPVTSEPSSPKSLHSPLLTSMQGSDLESTTNIVRPSSLRMLLTKPTHTVHYYWRKFDDALMRPMFGGRGFVPFSPGSPTEQSHGGR

SEQ ID NO: 72855 - protein, 159 aa, Arabidopsis thaliana columbia
  Clone ID: JC-ATXLIB327421P2D11_FLI.pep
LLLLLLRKTKKQNKTKVSSGEEQMARTKQTARKSTGGKAPRKQLATKAARKSAPTTGGVKKPHRYRPGTVALREIRKYQKSTELLIRKLPFQRLVREIAQDFKTDLRFQSHAVLALQEAAEAYLVGLFEDTNLCAIHAKRVTIMPKDIQLARRIRGERA

SEQ ID NO: 72856 - protein, 269 aa, Arabidopsis thaliana columbia
  Clone ID: JC-ATXLIB327426P1F07_FLI.pep
MGRSPCCEKEHMNKGAWTKEEDERLVSYIKSHGEGRWRPLPRAAGLLRCGKSCRLRWINYLRPDLKRGNFTHDEDELIIKLHSLLGNKWSLIAARLPGRTDNEIKNYWNTHIKRKLLSKGIDPATHRGINEAKISDLKKTKDQIVKDVSFVTKFEETDKSGDQKQNKYIRNGLVCKEERVVVEEKIGPDLNLELRISPPWQNQREISTCTASRFYMENDMECSSETVKCQTENSSSISYSSIDISSSNVGYDFLGLKTRILDFRSLEMK

SEQ ID NO: 72857 - protein, 261 aa, Arabidopsis thaliana columbia
  Clone ID: JC-ATXLIB327427P2E07_FLI.pep
RSTKMGRSPCCEKAHMNKGAWTKEEDQLLVDYIRKHGEGCWRSLPRAAGLQRCGKSCRLRWMNYLRPDLKRGNFTEEEDELIIKLHSLLGNKWSLIAGRLPGRTDNEIKNYWNTHIKRKLLSRGIDPNSHRLINEFVVSPSSLQNDVVETIHLDFSGPVKPEPVREEIGMVNNCESSGTTSEKDYGNEEDWVLNLELSVGPSYRYESTRKVSVVDSAESTRRWGSELFGAHESDAVCLCCRIGLFRNESCRNCRVSDVRTH

SEQ ID NO: 72858 - protein, 324 aa, Arabidopsis thaliana columbia
  Clone ID: JC-ATXLIB327431P2F03_FLI.pep
KDPAMSNPTRKNMERIKGPWSPEEDDLLQRLVQKHGPRNWSLISKSIPGRSGKSCRLRWCNQLSPEVEHRAFSQEEDETIIRAHARFGNKWATISRLLNGRTDNAIKNHWNSTLKRKCSVEGQSCDFGGNGGYDGNLGEEQPLKRTASGGGGVSTGLYMSPGSPSGSDVSEQSSGGAHVFKPTVRSEVTASSSGEDPPTYLSLSLPWTDETVRVNEPVQLNQNTVMDGGYTAELFPVRKEEQVEVEEEEAKGISGGFGGEFMTVVQEMIRTEVRSYMADLQRGNVGGSSSGGGGGGSCMPQSVNSRRVGFREFIVNQIGIGKME

SEQ ID NO: 72859 - protein, 399 aa, Glycine max
  Clone ID: LIB3242-317-E4_FLI.pep
EGEMESPPQLGSRGAETLKHIAPGSSISVAYHPSFGPYDDLLFLELDEKLLPDVLNERVVLRGQPDEDAVLCTLSKTYAMKFVGTSNSVLLVPPANHSEFSENPQKNDSTNDEDKVVVPVLKVVSGNMELIETAPRLDKLKLLLSEKPYKLEEDDMGNLEENQESRIGLYNWNYLVDNIQASDKELLSGLQALSALEINGYWRLVDGSYMDMILGMLLKNAVLNDWSLNALNEDEVVSILESDGFPRVLARHCLHVYGNKVNECMPSFVWKLDEKRVCIHFAREILKGGKRKLESFMDEWKQKIPDGMHPTFDLVEGEVLTERLGVETWVRAFSVASLPSTPAERFSILFRERPKWEWKDLQPYIRDLKVPGLSSEGLLLKYTRRTQPSPDTEPVFSAR

SEQ ID NO: 72860 - protein, 345 aa, Arabidopsis thaliana columbia
  Clone ID: JC-ATXLIB327409P1A09_FLI.pep
SYLMASNSEKNPLLSDEKPKSTEENKSSKPESASGSSTSSAMPGLNFNAFDFSNMASILNDPSIREMAEQIAKDPAFNQLAEQLQRSIPNAGQEGGFPNFDPQQYVNTMQQVMHNPEFKTMAEKLGTALVQDPQMSPFLDAFSNPETAEHFTERMARMKEDPELKPILDEIDAGGPSAMMKYWNDPEVLKKLGEAMGMPVAGLPDQTVSAEPEVAEEGEEEESIVHQTASLGDVEGLKAALASGGNKDEEDSEGRTALHFACGYGELKCAQVLIDAGASVNAVDKNKNTPLHYAAGYGRKECVSLLLENGAAVTLQNLDEKTPIDVAKLNSQLEVVKLLEKDAFL

SEQ ID NO: 72861 - protein, 310 aa, Arabidopsis thaliana columbia; identical to SEQ ID NO: 41694
  Clone ID: JC-ATXLIB327414P3G12_FLI.pep

SEQ ID NO: 72862 - protein, 277 aa, Arabidopsis thaliana columbia
  Clone ID: JC-ATXLIB327418P2D08_FLI.pep
FGILKKLKINFPHFFFSFFCFVFFIKEKEREREFPKAELSWVKQILRMGRGKIEIKRIENSTNRQVTFCKRRNGLLKKAYELSVLCDAEVALIVFSTRGRLYEYANNNIRSTIERYKKACSDSTNTSTVQEINAAYYQQESAKLRQQIQTIQNSNRNLMGDSLSSLSVKELKQVENRLEKAISRIRSKKHELLLVEIENAQKREIELDNENIYLRTKVAEVERYQQHHHQMVSGSEINAIEALASRNYFAHSIMTAGSGSGNGGSYSDPDKKILHLG

SEQ ID NO: 72863 - protein, 127 aa, Zea mays
  Clone ID: GC-ZMLELIB3453052C02_FLI.pep
GYSTGKLCGMLFIIKFVFDAITIISLQFQVWDVTRSQVFVGMREHERRVWSVDFSIVDPTKLVSGSDDGSVKLWDMNQAILFLHLLYVRLLTNDNMVIELVCERRIIFRHCYNRFFVNYAGWEYWHY

SEQ ID NO: 72864 - protein, 284 aa, Oryza sativa
  Clone ID: UC-OSFLM202068C06_FLI.pep
RSPHSHSPETLARSSRRMDEGGGAGAAAAAAGNAAGAAVHHNARSAEDVFRDFRARRAGIVKALTTDVEKFYRQCDPEKENLCLYGLPNETWDVTLPAEEVPPELPEPALGINFARDGMIEKDWLSLVAVHSDAWLLSVAFYFGARFGFDKEARRRLFTMINGLPTVYEVVTGIAKKQTKVSNGSSKSNKSNPKPSKQSNSNSKPAKPPQPKDEEDSGPEGAEDEDQAYMCGACGETYANGEFWICCDVCEKWFHGKCVRITPAKAEHIKQYKCPGCSSKRSRE

SEQ ID NO: 72865 - protein, 328 aa, Arabidopsis thaliana columbia
  Clone ID: JC-ATXLIB327407P2G12_FLI.pep
EIHNIFLHTFFHFPGKTAEKIKETKKSLFLCGDQRRMYSAIRSSLPLDGSLGDYSDGTNLPIDACLVLTTDPKPRLRWTSELHERFVDAVTQLGGPDKATPKTIMRTMGVKGLTLYHLKSHLQKFRLGRQSCKESIDNSKDVSCVAESQDTGSSSTSSLRLAAQEQNESYQVTEALRAQMEVQRRLHEQLEVQRRLQLRIEAQGKYLQSILEKACKAIEEQAVAFAGLEAAREELSELAIKASITNGCQGTTSTFDTTKMMIPSLSELAVAIEHKNNCSAESSLTSSTVGSPVSAALMKKRQRGVFGNGDSVVVGHDAGWVMPSSSIG

SEQ ID NO: 72866 - protein, 546 aa, Arabidopsis thaliana columbia
  Clone ID: JC-ATXLIB327408P2A09_FLI.pep
ILLLSFHNFCLTNSNTKKFHFLTMKRSHQETSVEEEAPSMVEKLENGCGGGGDDNMDEFLAVLGYKVRSSDMADVAQKLEQLEMVLSNDIASSSNAFNDTVHYNPSDLSGWAQSMLSDLNYYPDLDPNRICDLRPITDDDECCSSNSNSNKRIRLGPWCDSVTSESTRSVVLIEETGVRLVQALVACAEAVQLENLSLADALVKRVGLLAASQAGAMGKVATYFAEALARRIYRIHPSAAAIDPSFEEILQMNFYDSCPYLKFAHFTANQAILEAVTTSRVVHVIDLGLNQGMQWPALMQALALRPGGPPSFRLTGVGNPSNREGIQELGWKLAQLAQAIGVEFKFNGLTTERLSDLEPDMFETRTESETLVVNSVFELHPVLSQPGSIEKLLATVKAVKPGLVTVVEQEANHNGDVFLDRFNEALHYYSSLFDSLEDGVVIPSQDRVMSEVYLGRQILNLVATEGSDRIERHETLAQWRKRMGSAGFDPVNLGSDAFKQASLLLALSGGGDGYRVEENDGSLMLAWQTKPLIAASAWKLAAELRR

SEQ ID NO: 72867 - protein, 283 aa, Arabidopsis thaliana columbia
  Clone ID: JC-ATXLIB327409P4C08_FLI.pep
FLQLLQISYFPENHFPKKNKTFPFVLLPPTAITAYQSELGGDSSPLRKSGRGKIEIKRIENTTNQVTFCKRRNGLLKKAYELSVLCDAEVALIVFSSRGRLYEYSNNSVKGTIERYKKAISDNSNTGSVAEINAQYYQQESAKLRQQIISIQNSNRQLMGETIGSMSPKELRNLEGRLERSITRIRSKKNELLFSEIDYMQKREVDLHNDNQILRAKIAENERNNPSISLMPGGSNYEQLMPPPQTQSQPFDSRNYFQVAALQPNNHHYSSAGRQDQTALQLV

SEQ ID NO: 72868 - protein, 296 aa, Arabidopsis thaliana columbia
  Clone ID: JC-ATXLIB327417P2E11_FLI.pep
LCGDVAALGWWDLFINFGIAECFAFLVCTKWSNQSIHRYSHIPEPSSSSMVVRYLDWNRGLVVTADDEHQQSNRICGLQDIGGHVMKIPFVTFQIILFMRLEGTPASAKNIPILVLFVPLFLLQGAGVLFAMYRLVEKSVLLINSGSGSYGRYFTATSSAREFLGFFQHGARLLGWWSIDEGSREEQARLYSGEATGYNTFSPEVVKKMPKSDLVEEIWRLQAALSEQTDITSYSQQEYERLQNEKILCRVCFEDPINVVLLPCRHHVLCSTCCEKCKKCPICRVLIEERMPVYDV

SEQ ID NO: 72869 - protein, 455 aa, Arabidopsis thaliana columbia
  Clone ID: JC-ATXLIB327418P1A06_FLI.pep
FCVSLISLWTFCFGFWRLLIRSLLVGLGQVLEMDKEKSPAPPPSGGLPPPSGRYSAFSPNGSSFAMKAESSFPPLTPSGSNSSDANRFSHDISRMPDNPPKNLGHRRAHSEILTLPDDLSFDSDLGVVGAADGPSFSDDTDEDLLYMYLDMEKFNSSATSTSQMGEPSEPTWRNELASTSNLQSTPGSSSERPRIRHQHSQSMDGSTTIKPEMLMSGNEDVSGVDSKKAISAAKLSELALIDPKRAKRIWANRQSAARSKERKMRYIAELERKVQTLQTEATSLSAQLTLLQRDTNGLGVENNELKLRVQTMEQQVHLQDALNDALKEEVQHLKVLTGQGPSNGTSMNYGSFGSNQQFYPNNQSMHTILAAQQLQQLQIQSQKQQQQQQQHQQQQQQQQQQFHFQQQQLYQLQQQQRLQQQEQQSGASELRRPMPSPGQKESVTSPDRETPLTKD

SEQ ID NO: 72870 - protein, 240 aa, Arabidopsis thaliana columbia
  Clone ID: JC-ATXLIB327418P4D12_FLI.pep
LQHCFLTRNPPSSSHEYNLKLYQKMEGQRTQRRGYLKDKATVSNLVEEEMENGMDGEEEDGGDEDKRKKVMERVRGPSTDRVPSRLCQVDRCTVNLTEAKQYYRRHRVCEVHAKASAATVAGVRQRFCQQCSRFHELPEFDEAKRSCRRRLAGHNERRRKISGDSFGEGSGRRGFSGQLIQTQERNRVDRKLPMPTHHSSDHRSDKPSRSLSSVIYICSIYTLIRQIMASNNVKKSWSWY

SEQ ID NO: 72871 - protein, 85 aa, Arabidopsis thaliana columbia
  Clone ID: JC-ATXLIB327421P1F03_FLI.pep
EDAMFYESSMILVRFSARFTQTTLLFSFSITLMAALRVSVFRGQNRSQVDGWQWQHRLLPVCRDQAPHQASSPWLLKSGAIVDFT

SEQ ID NO: 72872 - protein, 439 aa, Arabidopsis thaliana columbia
  Clone ID: JC-ATXLIB327421P4F06_FLI.pep
RLREDDRRGKRTKKKGQTKTMAFHHNHLSQDLSFNHFTDQHQPPPPQPPPPPPQQQQHFQEAPPPNWLNTALLRSSDNNNNFLNLHTATANTTTASSSDFPSSAAAAAAANQWLSRPSSFLQRNNNNNASIVGDGIDDVTGGADTMIQGEMKTGGGENKNDGGGATAADGVVSWQNARHKAEILSHPLYEQLLSAHVACLRIATPVDQLPRIDAQLAQSQHVVAKYSALGAAAQGLVGDDKELDQFMTHYVLLLCSFKEQLQQHVRVHAMEAVMACWEIEQSLQSLTGVSPGEGMGATMSDDEDEQEESDANMFDGGLDVLGFGPLIPTESERSLMERVRQELKHELKQGYKEKIVDIREEILRKRRAGKLPGDTTSVLKAWWQSHSKWPYPTEEDKARLVQETGLQLKQMNNWFINQRKRNWHSNPSSSTVLKNKRKR

SEQ ID NO: 72873 - protein, 90 aa, Arabidopsis thaliana columbia
  Clone ID: JC-ATXLIB327423P2F12_FLI.pep
QMKHVVKILSLLVAISAFWIGLLQAAIIPRSHTWLLPIYFVVSLGCYGLLMVGVGLMQFPTCPQEAVLLQKDIAEAKGFFKHKGVDVGSN

SEQ ID NO: 72874 - protein, 147 aa, Arabidopsis thaliana columbia
  Clone ID: JC-ATXLIB327424P3E10_FLI.pep
ERDGSPWNPTHVGDTSVLQNDGHNGLSESSGSITRLASIDSFDSRWQQFLEPGESVLMISAVKKLQKITSKKVQLILTNKPRLIYVDPSKLVVKGNIIWSDNSNDLNVQVSSPSHFKICTPKKVLSFEDAKQRALQWKKAIETLQNR

SEQ ID NO: 72875 - protein, 149 aa, Arabidopsis thaliana columbia; identical to SEQ ID NO: 41655
  Clone ID: JC-ATXLIB327426P3C09_FLI.pep

SEQ ID NO: 72876 - protein, 832 aa, Arabidopsis thaliana columbia
  Clone ID: JC-ATXLIB327427P2G01_FLI.pep
LHHLLSSLSLSLHRVHSNTDPFSLLLKVLLCHLVAESTKRRIKIRPLLDINDSGFLGFWSWIHMGSYPDGFPGSMDELDFNKDFDLPPSSNQTLGLANGFYLDDLDFSSLDPPEAYPSQNNNNNNINNKAVAGDLLSSSSDDADFSDSVLKYISQVLMEEDMEEKPCMFHDALALQAAEKSLYEALGEKYPSSSSASSVDHPERLASDSPDGSCSGGAFSDYASTTTTTSSDSHWSVDGLENRPSWLHTPMPSNFVFQSTSRSNSVTGGGGGGNSAVYGSGFGDDLVSNMFKDDELAMQFKKGVEEASKFLPKSSQLFIDVDSYIPMNSGSKENGSEVFVKTEKKDETEHHHHHSYAPPPNRLTGKKSHWRDEDEDFVEERSNKQSAVYVEESELSEMFDKILVCGPGKPVCILNQNFPTESAKVVTAQSNGAKIRGKKSTSTSHSNDSKKETADLRTLLVLCAQAVSVDDRRTANEMLRQIREHSSPLGNGSERLAHYFANSLEARLAGTGTQIYTALSSKKTSAADMLKAYQTYMSVCPFKKAAIIFANHSMMRFTANANTIHIIDFGISYGFQWPALIHRLSLSRPGGSPKLRITGIELPQRGFRPAEGVQETGHRLARYCQRHNVPFEYNAIAQKWETIQVEDLKLRQGEYVVVNSLFRFRNLLDETVLVNSPRDAVLKLIRKINPNVFIPAILSGNYNAPFFVTRFREALFHYSAVFDMCDSKLAREDEMRLMYEKEFYGREIVNVVACEGTERVERPETYKQWQARLIRAGFRQLPLEKELMQNLKLKIENGYDKNFDVDQNGNWLLQGWKGRIVYASSLWVPSSS

SEQ ID NO: 72877 - protein, 152 aa, Arabidopsis thaliana columbia
  Clone ID: JC-ATXLIB327407P2A01_FLI.pep
HRIVADRSDSARFCSHLKDLSDLFQIFSERMKRIGDKEIDGSGSQNQHPVGSPRNELQGQSPKPGNGNTKDALTTDDALAYLKEIKDVFHDQKYKYHLFLEIMSDFKAQRTDTSVVIARVKDLLKGHNHLILVFNKFLPHGFEITLDDEDED

SEQ ID NO: 72878 - protein, 125 aa, Arabidopsis thaliana columbia
  Clone ID: JC-ATXLIB327407P2C07_FLI.pep
VHPLLFAVRFSLAVEINMAPKKDKVPPPSSKPAKSGGGKQKKKKWSKGKQKEKVNNMVLFDQATYDKLLTEAPKFKLITPSILSDRMRINGSLARRAIRELMAKGVIRMVAAHSSQQIYTRATNT

SEQ ID NO: 72879 - protein, 99 aa, Arabidopsis thaliana columbia
  Clone ID: JC-ATXLIB327408P2H10_FLI.pep
WSTTWLRVDFSAPTYDCRIRLVAVATQKFVADVASDALQHCKARPAPVVKDKKQQKDKRLVLTMEDLSKALREYGVNVKHPEYFADSPSTGMDPATRDE

SEQ ID NO: 72880 - protein, 269 aa, Arabidopsis thaliana columbia; identical to SEQ ID NO: 37019
  Clone ID: JC-ATXLIB327408P3B01_FLI.pep

SEQ ID NO: 72881 - protein, 274 aa, Arabidopsis thaliana columbia
  Clone ID: JC-ATXLIB327408P3C12_FLI.pep
FLFKNSFSLPTFSFLLIYRNLENSGSMEEGGSSHDAESSKKLGRGKIEIKRIENTTNRQVTFCKRRNGLLKKAYELSVLCDAEVALVIFSTRGRLYEYANNSVRGTIERYKKACSDAVNPPSVTEANTQYYQQEASKLRRQIRDIQNSNRHIVGESLGSLNFKELKNLEGRLEKGISRVRSKKNELLVAEIEYMQKREMELQHNNMYLRAKIAEGARLNPDQQESSVIQGTTVYESGVSSHDQSQHYNRNYIPVNLLEPNQQFSGQDQPPLQLV

SEQ ID NO: 72882 - protein, 273 aa, Arabidopsis thaliana columbia
  Clone ID: JC-ATXLIB327408P3G11_FLI.pep
KKGTPWTEEEHRMFLLGLQKLGKGDWRGISRNYVTTRTPTQVASHAQKYFIRQSNVSRRKRRSSLFDMVPDEVGDIPMDLQEPEEDNIPVETEMQGADSIHQTLAPSSLHAPSILEIEECESMDSTNSTTGEPTATAAAASSSSRLEETTQLQSQLQPQPQLPGSFPILYPTYFSPYYPFPFPIWPAGYVPEPPKKEETHEILRPTAVHSKAPINVDELLGMSKLSLAESNKHGESDQSLSLKLGGGSSSRQSAFHPNPSSDSSDIKSVIHAL

SEQ ID NO: 72883 - protein, 152 aa, Arabidopsis thaliana columbia
  Clone ID: JC-ATXLIB327410P3F03_FLI.pep
EVKETSKPKILLVEDNKINIMVAKSMMKQLGHTMDIANNGVEAITAINSSSYDLVLMDVCMPVLDGLKATRLIRSYEETGNWNAAIEAGVDISTSENEQVCMRPTNRLPIIAMTANTLAESSEECYANGMDSFISKPVTLQKLRECLQQYLH

SEQ ID NO: 72884 - protein, 295 aa, Arabidopsis thaliana columbia
  Clone ID: JC-ATXLIB327411P1E12_FLI.pep
AYRAFSETSPFLQFVNFTANQTILESFEGFDRIHIVDFDIGYGGQWASLIQELAGKRNRSSSAPSLKITAFASPSTVSDEFELRFTEENLRSFAGETGVSFEIELLNMEILLNPTYWPLSLFRSSEKEAIAVNLPISSMVSGYLPLILRFLKQISPNVVVCSDRSCDRNNDAPFPNGVINALQYYTSLLESLDSGNLNNAEAATSIERFCVQPSIQKLLTNRYRWMERSPPWRSLFGQCGFTPVTLSQTAETQAEYLLQRNPMRGFHLEKRQSSSPSLVLCWQRKELVTVSAWKC

SEQ ID NO: 72885 - protein, 315 aa, Arabidopsis thaliana columbia
  Clone ID: JC-ATXLIB327412P3D05_FLI.pep
RKWSIISGHGLVLSHQLPPLQANPNPNHHHVATSAGLPSRMGGSMAERARQANIPPLAGPLKCPRCDSSNTKFCYYNNYNLTQPRHFCKGCRRYWTQGGALRNVPVGGGCRRNNKKGKNGNLKSSSSSSKQSSSVNAQSPSSGQLRTNHQFPFSPTLYNLTQLGGIGLNLAATNGNNQAHQIGSSLMMSDLGFLHGRNTSTPMTGNIHENNNNNNNENNLMASVGSLSPFALFDPTTGLYAFQNDGNIGNNVGISGSSTSMVDSRVYQTPPVKMEEQPNLANLSRPVSGLTSPGNQTNQYFWPGSDFSGPSNDLL

SEQ ID NO: 72886 - protein, 354 aa, Arabidopsis thaliana columbia
  Clone ID: JC-ATXLIB327413P2A07_FLI.pep
ETMFGLRKSPANLPKHNSVDLKSSKPNPFDSDDESDNKHTLNPSKRTTSEPSLADMTNPFGGERVQKGDSSSSKQSLFSNSKYQYKNNFRDSGGIENQSVQELEGYAVYKAEETTKSVQGCLKVAEDIRSDATRTLVMLHDQGEQITRTHHKAVEIDHDLSRGEKLLGSLGGMFSKTWKPKKTRPINGPVVTRDDSPTRRVNHLEKREKLGLNSAPRGQSRTREPLPESADAYQRVEMEKAKQDDGLSDLSDILGELKNMAVDMGSEIEKQNKGLDHLLAMNEAICIDKVRVTGYFVWSLLDNFEWQDGYKNRFGLYYVDFKNNLTRYEKESAKYYKDFLAQGVRPSALKRDEL

SEQ ID NO: 72887 - protein, 583 aa, Arabidopsis thaliana columbia
  Clone ID: JC-ATXLIB327415P1B08_FLI.pep
SNPSSMDLPEECWELICKAIDEDDYRFLESVSLVSTLFLSITNRVRSTFVVTDRAVPLLNRHLLRFRNLKRIRFSDFTQDLNSILLQVSRSGLDFESVDVSQTRYFPDFEMKNVKELKCYGVGGFSDSDLVSIGVNFPLLEKLDISYPNSSPSRVSDSGVIELSSNLKGLLKINISGNSFITDKSLIALSQNCLLLREIIFRDCDFISSDCIKFVLRNSRNLESLAINGIGLRPRESLLTDAFLFARCLTELDLSDSFLSDDLLCLIASAKLPLKKLLLSDCHGFTFDGILYLLDKYQSLVHLNLKGANFLSDEMVMKLGMFFRRLTFLNLSFCSKLTGLAFFSIIERCVSLRCMIMVGTNFGVEEYTKDTKDFKSGVKFLYLSRNHNLLDECLEKISRHCPFIESLDVAQCPGITRDGILEVWRNCGKLRSLDISRCTGIKSLGVVDFELPKLESLRACGTWIDDEALDMISKKCRGLLHLDLQGCLNVSSRGVKEVVQSCIRLREINLKYCEADKKMYTWMVFANPSLRKIVPPCGFSPTKALKNFFLRHGCVVSQDSSELLSIAYRANGRDDDTLTRLII

SEQ ID NO: 72888 - protein, 301 aa, Arabidopsis thaliana columbia
  Clone ID: JC-ATXLIB327415P3F04_FLI.pep
MAPMSLPPGFRFHPTDEELVAYYLDRKVNGQAIELEIIPEVDLYKCEPWDLPEKSFLPGNDMEWYFYSTRDKKYPNGSRTNRATRAGYWKATGKDRTVESKKMKMGMKKTLVYYRGRAPHGLRTNWVMHEYRLTHAPSSSLKESYALCRVFKKNIQIPKRKGEEEEAEEESTSVGKEEEEEKEKKWRKCDGNYIEDESLKRASAETSSSELTQGVLLDEANSSSIFALHFSSSLLDDHDHLFSNYSHQLPYHPPLQLQDFPQLSMNEAEIMSIQQDFQCRDSMNGTLDEIFSSSATFPASL

SEQ ID NO: 72889 - protein, 143 aa, Arabidopsis thaliana columbia
  Clone ID: JC-ATXLIB327415P3F10_FLI.pep
FSRVTVIVSTGKYKNFTIFLTIPFLHVQDLEEKIQNYLPHKELLETVQSKLEEPNVDNVSVDSLISLEEQLETALSVSRARKAELMMEYIESLKEKEKLLREENQVLASQMGKNTLLATDDERGMFPGSSSGNKIPETLPLLN

SEQ ID NO: 72890 - protein, 720 aa, Arabidopsis thaliana columbia
  Clone ID: JC-ATXLIB327417P1D12_FLI.pep
FSRAAHISLHRLLVFSHQRSEQKWNWTRSFLLLSLGWGFYDTCTGLIMSINRDEALRAKDLAEGLMKKTDFTAARKLAMKAQKMDSSLENISRMIMVCDVHCAATEKLFGTEMDWYGILQVEQIANDVIIKKQYKRLALLLHPDKNKLPGAESAFKLIGEAQRILLDREKRTLHDNKRKTWRKPAAPPYKAQQMPNYHTQPHFRASVNTRNIFTELRPEIRHPFQKAQAQPAAFTHLKTFGTSCVFCRVRYEYDRAHVNKEVTCETCKKRFTAFEEPLQSAPQAKGPSQTTYCFPQQSKFPDQRACSEPHKRPENPPTVSSSKASFPMPGSTAKHNGKRKRKNVAECSESSDSESSSESEDDVNNDTTAAQDSGSNGGEQPRRSVRSKQKVSYNENLSDDDVDLVNDNGEGSGKNIDTEREKETEEEKQTNENHSSTESIDMNGKIEVDQVETPSGASDSEEDLSSGSAEKPNLINYDDPDFNDFDKLREKSCFQAGQIWAVYDEEEGMPRFYALIKKVTTPDFMLRYVWFEVDQDQENETPNLPVSVGKFVVGNIEETNLCSIFSHFVYSTTKIRTRKFTVFPKKGEIWALFKNWDINCSADSVSPMKYEYEFVEILSDHAEGATVSVGFLSKVQGFNCVFCPMPKDESNTCEIPPHEFCRFSHSIPSFRLTGTEGRGITKGWYELDPAALPASVSQNLSGEEAAQDRDRQSPPSGSAS

SEQ ID NO: 72891 - protein, 406 aa, Arabidopsis thaliana columbia
  Clone ID: JC-ATXLIB327417P1E07_FLI.pep
KMEEERENTNSIYIVSELLEEIFLGLPLKSILKFKTVSKQWRSILESNLFVERRRTLQKNHPKILAAYNCDYCTRPGILPKSQFEGDEEIVYLHTDATQPSMTCDGLVCITEPGWFNVLNVSTGQLRRFLPGPDPGPQANWLLGFGRDKVTGKYKIVRMCFHDCYEFGILDIESGEWSKLMSPPHIMRVGSKSVCVNGSIYWLQISVSYIILALDLHQETFNGVYHLPATWVTQDTQLVNLEDRLAMAMTTKVGPEWILEIWSMDIEEKGWSKRYTWSKAYSISLAHRVVVSWPWQKRWFTPVSVSKQGNLVFYDNHKRLFKYYSGTDEIRCLSSNINVISSYVENLAPLPLKPSHTHHDLGNSNSKFSTSRCHLFPTRGSWISKVFRRNVLFTSLVVVGYIYLPL

SEQ ID NO: 72892 - protein, 194 aa, Arabidopsis thaliana columbia
  Clone ID: JC-ATXLIB327417P4E02_FLI.pep
LIPFPRLHFFMVGFAPLTSRGSQQYRSLTVPELTQQMWDSKNMMCAADPRHGRYLTASAMFRGKMSTKEVDEQMLNVQNKNSSYFVEWIPNNVKSTVCDIPPTGLKMASTFIGNSTSIQEMFRRVSEQFTAMFRRKAFLHWYTGEGMDEMEFTEAESNMNDLVSEYQQYQDATADEEGDYEDEEEGEYQQEEEY

SEQ ID NO: 72893 - protein, 515 aa, Arabidopsis thaliana columbia
  Clone ID: JC-ATXLIB327419P2D10_FLI.pep
VSHVGITLGFFFSVVSHNPIIQFSTWASMGRSRGNFQNFEDPTQRTRKKKNAANVENFESTSLVPGAEGGGKYNCDYCQKDITGKIRIKCAVCPDFDLCIECMSVGAEITPHKCDHPYRVMGNLTFPLICPDWSADDEMLLLEGLEIYGLGNWAEVAEHVGTKSKEQCLEHYRNIYLNSPFFPLPDMSHVAGKNRKELQAMAKGRIDDKKAEQNMKEEYPFSPPKVKVEDTQKESFVDRSFGGKKPVSTSVNNSLVELSNYNQKREEFDPEYDNDAEQLLAEMEFKENDTPEEHELKLRVLRIYSKRLDERKRRKEFIIERNLLYPNPFEKDLSQEEKVQCRRLDVFMRFHSKEEHDELLRNVVSEYRMVKRLKDLKEAQVAGCRSTAEAERYLGRKRKRENEEGMNRGKESGQFGQIAGEMGSRPPVQASSSYVNDLDLIGFTESQLLSESEKRLCSEVKLVPPVYLQMQQVMSHEIFKGNVTKKSDAYSLFKIDPTKVDRVYDMLVKKGIAQL

SEQ ID NO: 72894 - protein, 332 aa, Arabidopsis thaliana columbia
  Clone ID: JC-ATXLIB327420P1B02_FLI.pep
NHKSPFQRAASHIAEALLSLIHNESSPPLITPENLILRIAAYRSFSETSPFLQFVNFTANQSILESCNESGFDRIHIIDFDVGYGGQWSSLMQELASGVGGRRRNRASSLKLTVFAPPPSTVSDEFELRFTEENLKTFAGEVKIPFEIELLSVELLLNPAYWPLSLRSSEKEAIAVNLPVNSVASGYLPLILRFLKQLSPNIVVCSDRGCDRNDAPFPNAVIHSLQYHTSLLESLDANQNQDDSSIERFWVQPSIEKLLMKRHRWIERSPPWRILFTQCGFSPASLSQMAEAQAECLLQRNPVRGFHVEKRQSSLVMCWQRKELVTVSAWKC

SEQ ID NO: 72895 - protein, 232 aa, Arabidopsis thaliana columbia
  Clone ID: JC-ATXLIB327420P3A01_FLI.pep
WINACKGLKFDQVLKKQIEKEKKREDMEVEKRIVVNGGMKLPIGYRFHPTEQELILHYLLPKAFASPLPSSIIPVFDLFFSHPLSFPGDQKEKQRYFFCKKREVSSNEHRIKISSGDGYWKPIGKERPIIACGKTFGIRRTLAFYETNKSSSYCNKTRWSMTEYCLAGFASAKVSGEWAVYNVYERKGSKGRKQRKSREGDDEELRCIDHFTVGSNHETGPPPPSPPTSADE

SEQ ID NO: 72896 - protein, 78 aa, Arabidopsis thaliana columbia
  Clone ID: JC-ATXLIB327421P3E08_FLI.pep
LRRLIFNQKYTLHKIHSNPVRFISYGTPKTHNETQTHLRNFNLLKLQMPLLILFIYYLLILTSLILSLTFFVIRRSII

SEQ ID NO: 72897 - protein, 241 aa, Arabidopsis thaliana columbia
  Clone ID: JC-ATXLIB327422P1E12_FLI.pep
LMSLVSGARDMGFDDNNNNKNNKDGDDENSSSRTRADDDALSRQMSESSLCATEEEEDDDSKLQLGPQYTIKEHLEKDKDDESLRKWKEQLLGSVDVTNIGETLDPEVRIDSLAIISPGRPDIVLLVPENGNPKGMWFTLKEGSKYNLKFTFHVNNNIVSGLRYTNTVWKTGVKVDRAKEMLGTFSPQLEPYNHVMPEETTPSGMFARGSYSARTKFLDDDNKCYLEINYSFDIRKEWPAL

SEQ ID NO: 72898 - protein, 294 aa, Arabidopsis thaliana columbia
  Clone ID: JC-ATXLIB327422P3A10_FLI.pep
FTLSTMLSMLWFLLSLLSLLLLPCLRPCFPAKGSLKNKKKIDKGTYVVGEEETPKELQRELMPRHVAVIMDGNRRWAKQTGLLTSQGYEAGAKRLLEFADLCFKLGINTVSAFAFSTENWGRHKIEVKCLMYLFQRYLKSKIQFFQSKEIRVSVIGNLAKIPESLLRTVHELEEATKSYKKKHLILAIDYSGRFDILGACKNIVKKSEQGLIREEDVDETLFERELQTRCTEFPSPDLLIRTSGEQRISNFFLWQLAYTEFFFSPVLWPDFDKQKFIEALVSYQRRDRRFGSRL

SEQ ID NO: 72899 - protein, 356 aa, Arabidopsis thaliana columbia
  Clone ID: JC-ATXLIB327422P3H11_FLI.pep
KTISILMATTKLVYILLILFTFTVSPAISTAPEHCDSGFDNPCINKAKALPLKIVAIVAILTTSLIGVTSPLFSRYISFLRPDGNGFMIVKCFSSGIILGTGFMHVLPDSFEMLSSKCLSDNPWHKFPFAGFVAMMSGLVTLAIDSITTSLYTGKNSVGPVPDEEYGIDQEKAIHMVGHNHSHGHGVVLATKDDGQLLRYQVIAMVLEVGILFHSVVIGLSLGATNDSCTIKGLIIALCFHHLFEGIGLGGCILQADFTNVKKFLMAFFFTGTTPCGIFLGIALSSIYRDNSPTALITIGLLNACSAGMLIYMALVDLLATEFMGSMLQGSIKLQIKCFTAALLGCAVMSVVAVWA

SEQ ID NO: 72900 - protein, 275 aa, Arabidopsis thaliana columbia
  Clone ID: JC-ATXLIB327423P1E12_FLI.pep
TSLVNSGDTTCSEQLESVVCSFGTESDVSKYANSLVCCGGGGITISVTFGFSSHMALPNQQTVDYPSFKLVIVGDGGTGKTTFVKRHLTGEFEKKYEPTIGVEVHPLDFFTNCGKIRFYCWDTAGQEKFGGLRDGYYIHGQCAIIMFDVTARLTYKNVPTWHRDLCRVCENIPIVLCGNKVDVKNRQVKAKQVTFHRKKNLQYYEISAKSNYNFEKPFLYLARKLAGDQNLHFVESLALAPPEIHLDIAAQQQNEADLAAAAAQPLPDDDDDAFE

SEQ ID NO: 72901 - protein, 464 aa, Arabidopsis thaliana columbia
  Clone ID: JC-ATXLIB327423P4C05_FLI.pep
RFFQSSERKMAQMQREEVESVTTEKKRLDGGGGSSGAQATAFKFNAQAPEFVPRSHTTAPAPQVSPVSGYFYPCFHYNGGCIGGCGGGVCGGGGTGVGTQSSDWIYVGGGDPTAQHQHVHDPAAAFYISNPAVQFPASQNSSSSSKNLLSDDLRLKIVKQVEYQFTDMSLLANESISKHISKDPEGYVPVSYIASTKKIKALTSNHHLVSLALRSSSKLVVSEDGKKVKRTSQFTDRDREELQGRTVVAENLPDDHSYQNLEKIFGVVGNVKAIRICHPPESNSSRPKGDFLMSNKIHALIEYDNTVIADKAVEKLNDERNWRKGLRVRLLLRCSPKSVLKNRRNFDGILIDDELPSYESGEDSPRLHLTESQLDNDGDDNNVGGLWGKGRGKGRGRSPRSYAVGGGGRSFGIGLGVSLGIPSLGSHESSSPKTATKGPRMPDGTRGFTMGRGKPSISLSPNNL

SEQ ID NO: 72902 - protein, 652 aa, Arabidopsis thaliana columbia
  Clone ID: JC-ATXLIB327424P3F10_FLI.pep
FKSSVMSTTSSVRVRLAFVALLSATTFYCIHKYRRLKHLKNLSLNPSSTLKASRGKIFFISQTGTAKALAQRLHELCASNDIAFDIVDPHSYEPEDLPKETLVLFIASTWDGGKPPKNGEFLVNWLGESAEDFRVGSLLLSDCKFAVFGVGSRAYGESYNAVAKELSSRMIGLGGLEMIPVGEGDVDDGELDRAFQDWCDGVIRVLKGGSAQETNGVSQQIGAVEDDLEYYDSTDEEDEDNDADGGIVDLEDIAGKAPSKRNGVVKVTKVDGKKEMVTPVIRASLTKQGYKIIGSHSGVKICRWTKSQLRGRGGCYKHSFYGIESHRCMETTPSLACANKCVFCWRHHTNPVGKSWQWKMDEPSVIVKGALDLHKNMIKQMKGVPGVTPEKLQEGLNPRHCALSLVGEPIMYPEINALVDELHGRRISTFLVTNAQFPEKILMMKPITQLYVSVDAATKESLKAIDRPLFADFWERFIDSLKALQEKQQRTVYRLTLVKGWNTEELDAYFNLFSIGKPDFIEIKGVTYCGSSATSKLTMENVPWHTDVKAFSEALSLKSNGEYEVACEHAHSCCVLLGRTEKFKVDGKWFTWIDYEKFHDLVASGEPFTSTDYMAQTPSWAVYGAQEGGFDPGQLRYKKERNHPPKPQAVLA

SEQ ID NO: 72903 - protein, 357 aa, Arabidopsis thaliana columbia
  Clone ID: JC-ATXLIB327425P3F07_FLI.pep
RFLHVMGLKDIGSKLPPGFRFHPSDEELVCHYLCNKIRAKSDHGDVDDDDDDVDEALKGSTDLVEIDLHICEPWELPDVAKLNAKEWYFFSFRDRKYATGYRTNRATVSGYWKATGKDRTVMDPRTRQLVGMRKTLVFYRNRAPNGIKTTWIMHEFRLECPNIPPKEDWVLCRVFNKGRDSSLQDNNYYNNDNQTQRLEVNDAPDLNYNNQLPPLLSSPPHNHQHEKMKIQVCDQWEQLMKQPSRTTGHPYHHHCHHQTIACGWEQMMIGSLSSPSSHGPDHESLLNLLYVDNNNSVNISGDHHQNYEKILLSSLDMTSLDHDKTCMGSSSDGGMVSDLHMECGGLSFETENILAFQ

SEQ ID NO: 72904 - protein, 125 aa, Arabidopsis thaliana columbia
  Clone ID: JC-ATXLIB327425P3H02_FLI.pep
KMSRGNAAAAKGKKKGVSFTIDCSKPVDDKIMEIASLEKFLQERIKVGGKAGALGDSVSITREKSKITVTADGQFSKRYLKYLTKKYLKKHNVRDWLRVIAANKDRNLYELRYFNIAENEAEEED

SEQ ID NO: 72905 - protein, 241 aa, Arabidopsis thaliana columbia
  Clone ID: JC-ATXLIB327425P3H08_FLI.pep
ITCNFPHQKRFHQRSLSLHKPIFSRKKQTFSDQRLCAESEIFPGKRKMQDLTSAAAYYHQSMMMTTAKQNQPELPEQEQLKCPRCDSPNTKFCYYNNYNLSQPRHFCKNCRRYWTKGGALRNIPVGGGTRKSNKRSGSSPSSNLKNQTVAEKPDHHGSGSEEKEERVSGQEMNPTRMLYGLPVGDPNGASFSSLLASNMQMGGLVYESGSRWLPGMDLGLGSVRRSDDTWTDLAMNRMEKN

SEQ ID NO: 72906 - protein, 251 aa, Arabidopsis thaliana columbia
  Clone ID: JC-ATXLIB327426P2B11_FLI.pep
GCHSQSGYKNIQTLPKIKAPSLSFKKTFFGYDGVTEVFKVLCITGPRGFKPSRKCHVYTMGSGKNSWRRFKCRKRHYPSTEVLCKEGNLYYGAQSISRKSLLMRFNVRSEEFSVIKLPNQQVNFCRGWNLVNYNGKIAVAKNVDVDTGDLQMWVLDDMGEWLSEIITIPRWKETTNNCTYHFKGTIGTGELVFIARYFVDESPIVLYYNKNTKNLRRFTLEELFKDLPPLNHSSYHNIQIFLNHIDSTWLM

SEQ ID NO: 72907 - protein, 158 aa, Arabidopsis thaliana columbia
  Clone ID: JC-ATXLIB327431P3A01_FLI.pep
QLLGKRKIQDLVSQVDVHAKLDPDVEDLLLEVADDFIDSVTSFACSLAKHRKSSVLEPKDILLHLEKNLHLTIPGFSSEDKRQTKTVPTDLHKKRLAMVRALLESSKPETNASNSKETMRQAMVNPNGPNHLLRPSQSSEQLVSQTSGPHILQHMTRY

SEQ ID NO: 72908 - protein, 181 aa, Arabidopsis thaliana columbia
  Clone ID: JC-ATXLIB327432P3D03_FLI.pep
VATMKTAKGKDKVKTTKEALKPVDDRKVGKRKAPAEKPTKRETRKEKKAKKDPNKPKRAPSAFFVFLEDFRVTFKKENPNVKAVSAVGKAGGQKWKSMSQAEKAPYEEKAAKRKAEYEKQMDAYNKNLEEGSDESEKSRSEINDEDEASGEEELLEKEAAGDDEEEEEEEDDDDDDDEEED

SEQ ID NO: 72909 - protein, 483 aa, Arabidopsis thaliana columbia
  Clone ID: JC-ATXLIB327433P1D10_FLI.pep
IASLIQIHFRYHLEVEFVIFSFPLEFSKSHATMKEDMEVLSLASLPVGFRFSPTDEELVRYYLRLKINGHDNDVRVIREIDICKWEPWDLPDFSVVKTTDSEWLFFCPLDRKYPSGSRMNRATVAGYWKATGKDRKIKSGKTKIIGVKRTLVFYTGRAPKGTRTCWIMHEYRATEKDLDGTKSGQNPFVVCKLFKKQDIVNGAAEPEESKSCEVEPAVSSPTVVDEVEMSEVSPVFPKTEETNPCDVAESSLVIPSECRSGYSVPEVTTTGLDDIDWLSFMEFDSPKLFSPLHSQVQSELGSSFNGLQSESSELFKNHNEDYIQTQYGTNDADEYMSKFLDSFLDIPYEPEQIPYEPQNLSSCNKINDESKRGIKIRARRAQAPGCAEQFVMQGDASRRLRLQVNLNSHKSETDSTQLQFIKKEVKDTTTETMTKGCGNFTRSKSRTSFIFKKIAAMGCSYRGLFRVGVVAVVCVMSVCSLVA

SEQ ID NO: 72910 - protein, 774 aa, Glycine max
  Clone ID: 700726285_FLI.pep
KLNTFPMGCTASKLENEDTVRRCKERRRLMKEAVYVRHHLAAAHSDYCRSLRLTGSALSTFSTGEPLSVSDHTPAVFLNNSQHLQHQHQHQHQHQPSPSPPPPKLDPILPRRRKPPPPKLPHILSDSSPSSTPRSHVSNFFPTAHSTYSSTPSQTSSVWNWENFYPPPPPPASGYFPEEQQQKFSHTKTQTPSHYSHKTQTPSHYSHKTQQHTNLQIHDTDSERSEYDYFDGKLETENENEKTDSHSHHLPEEYTETEREEVQCSEWGDHYSTTSSSDDGDDGVEGDVESRSEIGTRSNFGSSVRTESVVGGGGAKGFDAASSVAAEMKMVVRHRDLREIVEAIKENFDNAASAGDKVSDMLQISKAQLDRSFKQLRKTVYHSSSILSNLSSSWTSKPPLAVKYRLDTGSLDEPGGPKSLCSTLERLLAWEKKLYEEIKAREGVKIEHEKKLSALQTQEYKGEDEAKIFKTKASINRLQSLISVTSQAVSTTSTAIIGLRDSDLVPQLVDLIHGFMYMWRSMHHYHEIQSNIVQQVRGLVNRSSRGDSTSELHRQATRDLESAVSAWHNSFCRLIKFQREFILSLHGWFKLSLVPVHNDNINGRETSETYQFFDEWKLALDRVPDTVASEAIKSFINVVHVISSKQVEELKIKKRTETASKELEKKASSLRNLERKFYSSYSMVGISLPDSAPDNGQVLDARDPLAEKKIELATCQRRVEDEMLRHSKAVEVTRAMTLNNLQTGLPGVFQALTSFSSLFAEALESVCTRSYAIK

SEQ ID NO: 72911 - protein, 860 aa, Glycine max
  Clone ID: 701009842_FLI.pep
LDLSLVRSSGGKPNRTSMSCKDGSRNGIGIGMDNGKYVRYTPEQVEALERLYHDCPKPSSIRRLQLIRECPTLSHIDPKQIKVWFQNRRCREKQRKESSRLQAVNRKLTAMNKLLMEEIDRLQKQVSQLVYENGYFRQHTTQNTKQQAIKDTSCESAVRSGQQHNLTTQHPPRDASPAGLLSIAEETLEEFLSKATGTAVEWVQMPGMKPGPDSIGIVAISHGCNGVAARACGLVGLEPTRVAEILKDRPLWFRDCRAVDVLNVLPTANGGTIELLYMQLYAPTTLAPARDFWLLRYTSVLEDSSLVICERSLKNTQNGPSMPPVQHFVRAEMLPSGYLIRPCEGGGSIIHIVDHMNLEPWSVPEVLRPLYESSKVLSQKTTMAALRHLRQISHEVSPSNVSGWGRRPSALRALSQRLSRGFNEALNGFTDEGWTTIGNDGVDDVTILVNSSPDKLMGLNLSFANGFPSVSNAVLCAKASMLLQNVHPAILLRFLREHRSEWADNNMDAYTAAAIKVGPCSFSGSRVGNYGGQVILPLAHTIEHEEFLEVIKLEGVAHSPDDTIMPREMFLLQLCSGMDENAVGTCAELISAPIDASFADDAPLLPSGFRIIPLESGKEASSPNRTLDLASSLDVGPSGNRASDECAGNSSYMRSVMTIAFEFAFESHMQEHVAAMARQYVRSIISSVQRVGLALSPSHLSSHAGLRSPLGTPEAQTLAHWICNSYRCYLGVELLKSNNEGNESLLKSLWHHSDAILCCTLKALPVFTFSNQAGLDMLETTLVALQDIPLEKIFDDHERKILFSEFPQIIQQGFACLQGGICLSSMGRPVSYERVVAWKVLNEEENAHCICFMFMNWSFV

SEQ ID NO: 72912 - protein, 321 aa, Zea mays
  Clone ID: GC-ZMLELIB3348125F08_FLI.pep
LQSEFLNTSRNSLEEREAALRLREEIEEQELLLDFLQQLQKRKQDMADSLQDTVAFLSSDINEVLHQQSALGHCVNFSPDLDKEVCSGTVEDQSDCGSRKRFRPELQGVDMEENNRSVEECSRTVPSSELIQENVLSKSSRLMKNLKKLETAYFLTRSKLAKQVGNQINSCNRVVKRTTGSAVGTEASSIDDFSLERQYGRRQRGWVNSFLEGLCKYLSFSKLKVRAELKHCDSLNSSNLVCSVGFDRDREFFATAGVNKKIKVFEYNMIVNEHRDIHYPVVEMSNRSKLSCISWNSYMKSHIASSDFEGIVQVSSVACFL

SEQ ID NO: 72913 - protein, 121 aa, Zea mays
  Clone ID: GC-ZMLELIB3334201D02_FLI.pep
CSASLGNLNPGIYTSQPVVTALASPMTEGAKMPDIQCWLATKLARERPATKRSTMNPTGDDAVTAMITTVSAARRLVNPDASRGSKRSQVGPISSLPTRVVGSEPMTTNSVRGRRSMDTSS

SEQ ID NO: 72914 - protein, 378 aa, Arabidopsis thaliana columbia
  Clone ID: JC-ATXLIB327408P4B03_FLI.pep
FFFFSDEIIGDDEMIGDLMKNNNNGDVVDNEVNNRLSRWHHNSSRIIRVSRASGGKDRHSKVLTSKGPRDRRVRLSVSTALQFYDLQDRLGYDQPSKAVEWLIKAAEDSISELPSLNNTHFPTDDENHQNQTLTTVAANSLSKSACSSNSDTSKNSSGLSLSRSELRDKARERARERTAKETKERDHNHTSFTDLLNSGSDPVNSNRQWMASAPSSSPMEYFSSGLILGSGQQTHFPISTNSHPFSSISDHHHHHPHHQHQEFSFVPDHLISPAESNGGAFNLDFNMSTPSGAGAAVSAASGGGFSGFNRGTLQSNSTNQHQSFLANLQRFPTSESGGGPQFLFGALPAENHHHNHQFQLYYENGCRNSSEHKGKGKN

SEQ ID NO: 72915 - protein, 510 aa, Arabidopsis thaliana columbia
  Clone ID: JC-ATXLIB327413P2C03_FLI.pep
FLLPCFINRGSPKFGFSILKFSHFANFGEKRLFFLIVSSFLIHFSWFMICSSKGTILIARGKNSNTIPRLPLKGSSTNYANRIQIRNPISVKTFRRSSSSSMAVETMSMGSDSSTLILTSGASGRVRVLFSMRELKRLVTIIQSLILFLLLPFRVVVWRRRTGAVVIRDDKQERKVWSPPQIVVRKRNIGGESSVSPPSVPAAVVDGEVAVRRELAIKRVLEDEGGDGSSVRDYSLFTTKRGDTLFSQSWSPLSPNHRGLIVLLHGLNEHSGRYSDFAKQLNANGFKVYGIDWIGHGGSDGLHAYVPSLDYAVTDLKSFLEKVFTENPGLPCFCFGHSTGGAIILKAMLDPKIESRVSGIALTSPAVGVQPSHPIFAVLAPIMAFLLPRYQISAANKKGMPVSRDPAALIAKYSDPLVFTGSIRVKTGYEILRITAHLQQNLNKVKVPFLVMHGTDDTVTDPSASKKLYEEAASSDKSLKLYDGLLHDLLFEPEREIIAGAILDWLNQRV

SEQ ID NO: 72916 - protein, 332 aa, Arabidopsis thaliana columbia
  Clone ID: JC-ATXLIB327413P3E08_FLI.pep
EFGKSMEKKTKVLIVGGTGYLGQHLLQAFAGNYGGECELYDVAFTHHSSPLPARLLDAFPHSPAFPVDLKSGLGLNSISQDFRQPDVVVNCAALSVPRACEQDPDSAMSINVPTSLVNWLSSFETNKTLLIHLSTDQVYQGVKSFYKEEDETVAVNVYGKSKVAAELLIKDKCQSFAILRSSIIFGPQTVSPLPKTLPIQWIDSSLKKGDTVDFFHDEFRCPIYVKDLVNITFKLIDRWVSDDKQMRLVLNAGGPERLSRVQMAQMVAEVRGYDLSLIKHVSASSIDRGVVSPADISMDITKLIHTLELSPTSFKEGVRLTLDSESHSHMLP

SEQ ID NO: 72917 - protein, 211 aa, Arabidopsis thaliana columbia
  Clone ID: JC-ATXLIB327415P3B09_FLI.pep
APLEDIVRGVEEVDAVPGRCELIDEEQAFGVIVDHANTPDGLSRLLDSIRELKPRRIITVIGCEGENERGKRPLMTKIATEKSDVTMLTSDNPRNEDPLDILDDMLSGIGWTMQEYLKHGEHDYYPPLANGHRLFLHDIRRVAVRCAVAMGEEGDMVVVAGKGHEAYQLEGEKKEFYDDREECREALQYVDELHQAGIDTSEFPWRLPESH

SEQ ID NO: 72918 - protein, 507 aa, Arabidopsis thaliana columbia
  Clone ID: JC-ATXLIB327416P2G07_FLI.pep
STLVSIFILERFCFMDAILPVPVDGFRFDTGSGSCCKPRNNLESGTTNRFTCFNESESQSNPSPTESKVCSDYLPVFKYINDMLMEEDLEGQSCMLEDSLALQAAERSFFEVLQDQTPISGDLEDGSLGNFSSITSLHQPEVSEESTRRYRHRDDDEDDDLESGRKSKLPAISTVDELAEKFEEVLLVCQKNDQGEATEKKTRHVKGSSNRYKQQKSDQPVDMRNLLMQCAQAVASFDQRRAFEKLKEIREHSSRHGDATQRLGYHFAEALEARITGTMTTPISATSSRTSMVDILKAYKGFVQACPTLIMCYFTANRTINELASKATTLHIIDFGILYGFQWPCLIQALSKRDIGPPLLRVTGIELPQSGFRPSERVEETGRRLKRFCDKFNVPFEYSFIAKNWENITLDDLVINSGETTVVNCILRLQYTPDETVSLNSPRDTALKLFRDINPDLFVFAEINGTYNSPFFLTRFREALFHCSHSLTCMRPHYQKTTIAGHWWRGN

SEQ ID NO: 72919 - protein, 318 aa, Arabidopsis thaliana columbia
  Clone ID: JC-ATXLIB327416P3H10_FLI.pep
GGGGFHHFTNSISPFGSNPNPNPNPGGVSTGFVSPPLPVDSSPADSSAAAAGALVAPPSGDTSVKRKRGRPRKYGQDGGSVSLALSPSISNVSPNSNKRGRGRPPGSGKKQRLSSIGEMMPSSTGMSFTPHVIVVSIGEDIASKVISFSHQGPRAICVLSASGAVSTATLLQPAPSHGTIIYEGLFELISLSTSYLNTTDNDYPNRTGSLAVSLASPDGRVIGGGIGGPLIAASQVQVIVGSFIWAIPKGKIKKREETSEDVQDTDALENNNDNTAATSPPVPQQSQNIVQTPVGIWSTGSRSMDMHHPHMDIDLMRG

SEQ ID NO: 72920 - protein, 176 aa, Arabidopsis thaliana columbia
  Clone ID: JC-ATXLIB327406P4A02_FLI.pep
GKTSIGRLLFELIFFSLFLSLVVRSPFSFNLQGFYCEIFGGKMSGKGAKGLIMGKPSGSDKDKDKKKPITRSSRAGLQFPVGRVHRLLKTRSTAHGRVGATAAVYTAAILEYLTAEVLELAGNASKDLKVKRISPRHLQLAIRGDEELDTLIKGTIAGGGVIPHIHKSLINKSAKE

SEQ ID NO: 72921 - protein, 76 aa, Arabidopsis thaliana columbia
  Clone ID: JC-ATXLIB327407P1A06_FLI.pep
ELAGNAARDNKKNRINPRHLCLAIRNDEELGRLLHGVTIASGGVLPNINPVLLPKKSTASSSQAEKASATKSPKKA

SEQ ID NO: 72922 - protein, 50 aa, Arabidopsis thaliana columbia
  Clone ID: JC-ATXLIB327416P2E04_FLI.pep
YYDFKTHIDFLILVKRVLLREALLHVLLLRHKQATYIYKRLRIRDLLLVM

SEQ ID NO: 72923 - protein, 142 aa, Arabidopsis thaliana columbia
  Clone ID: JC-ATXLIB327422P1F07_FLI.pep
SLFDFEMARTKQTARKSTGGKAPRKQLATKAARKSAPATGGVKKPHRFRPGTVALREIRKYQKSTELLIRKLPFQRLVREIAQDFKTDLRFQSSAVAALQEAAEAYLVGLFEDTNLCAIHAKRVTIMPKDIQLARRIRGERA

SEQ ID NO: 72924 - protein, 131 aa, Zea mays
  Clone ID: LIB3060-107-F2_FLI.pep
LFRVDDPPYRSVDDAVHARKMCPQQSQLPEVVYLELWEHVVVEAAAKHGRHRRRQAAGRLRRVVEAGTAVEPLGRRRLVLMGSDGALVSWAHVHRHHRLALPACRGGRGRREHHEIGAVVADGQELVEGRV

SEQ ID NO: 72925 - protein, 132 aa, Zea mays subsp. mexicana
  Clone ID: UC-ZMFLTEOSINTE109H03_FLI.pep
IRHETDKTASTLQMNMNPRSDHGSIMACAVDRILFRRRYYIYTTRRRPLDSCAIAGPAQLQLQQEQPQLVPHLQVLQSQPPPSVAASKPPALALVVGAAITMVLMLLAAAVSTLGDMQLHELPQEQLEPQLH

SEQ ID NO: 72926 - protein, 608 aa, Zea mays; identical to SEQ ID NO: 59912
  Clone ID: LIB4743-032-H1_FLI.pep

SEQ ID NO: 72927 - protein, 728 aa, Zea mays
  Clone ID: LIB3689-238-G4_FLI.pep
KTMGEVSDDNSNMSFLKRIATSDVPLLKEYGVNGVVVALLLAVVTPVLLSMMFGKKTKQRAVRADVGGEEGFAMRNNRFSSLVEVPWEGATTMSALFEMASKKYSRRRCLGTRKLIKREFMESSDGRKFEKLHLGEYEWDTYTEAFNRACNFSSGLIKMGHDLDSHAAIFSDTRAEWIIAAQGCFRQNLTVVTIYASLGEDALVHSLNETQVSTLICDSKQLKKIPAISSKLQSLRRIIYIEDEPVEAETLNQMKHLTTLSFTEVEELGKTSHVDARLPSGSDTAVIMYTSGSTGLPKGVMITHGNMVATTAAVMTIVPNLGMNDVYLAYLPLAHVFELAGETVMLASGSAIGYGSALTMTDTSNKIKKGTKGDVSVLNPTLMISVPAILDRIRDAVFKKVGEKGGLTKKLFDFSYKRNIAAIEGSWFGSWAPERMLWDHIIYKPIRAMLGGRLRFVLCGGAPLSSDTQRFMNICLGVPVGQGYGLTETCAGAAFTEWDDTNVGRVGPPLPCCYVKLVSWEEGGYKISDSPMPRGEVVVGGHSITKGYFNNEAKTNEVYKVDERGIRWFYTGDIGQFHPDGCLEIIDRKKDIVKLQHGEYVSLGKVESALATSNYVENIMVYADPFHNYCVALVVPAHQALEKWAQNSGINYEGFAELCQNDRAIKEVQQSLSKAAKAARLEKFEVPAKIVLLPEPWTPESGLVTAALKLKREQIKAKFKDDLDKLYH

SEQ ID NO: 72928 - protein, 359 aa, Glycine max
  Clone ID: UC-GMFLMINSOY022C08_FLI.pep
EREAIRSKIKQIDDALKAIDKDIQSLQEELTAVSQKRDKAFESMQQLRKQREEGNTYFYQSRTVLNKARELAAKKDINALDEVSQTEVEKFMALWNKDKAFRNDYEKRILASLDMRQLSRDGRMRNPDEKPILEEPKPAEAEALPKTFTKQPKEEPKPSPQETLPAQKESKNKGRDLKSKPESKDVAETDEYEFKNPQKEAPAKECEIDPAKLKEMKREEEIAKAKQALERKKKLAEKAAAKAAIRAQKEAEKKLKDREKKAKKKSGAAAVANPEDEPKDEVVEATEPEKVNDDVQVLAPVKEKVQKESGIRSRGRARGPDSIPKAIIKRKKSNNYLIWAAAAALLVLLLAVLGYIYLF

SEQ ID NO: 72929 - protein, 711 aa, Glycine max
  Clone ID: 700904003_FLI.pep
KSANDKEMKSLTVNTEDSFSSLLELASNNDIEGFKVLLEKDSSSINEVGLWYGRQNGSKQFVLEHRTPLMVAATYGSIDVMKIILLCPEADVNFACGANKTTALHCAASGGSANAVDAVKILLSAGADVNGVDANGNRPIDVIAVPPKLQGAKAVLEELLSDSASEGSIGEFSVPVSVNTSSLGSPGHSSNGMPYTPSSSPPSPVVAKFTDAAVCSLSEKKEYPIDPSLPDIKNSIYATDEFRMFSFKVRPCSRAYSHDWTECPFVHPGENARRRDPRKFHYSCVPCPDFRKGACRRGDMCEYAHGVFECWLHPAQYRTRLCKDGTSCNRRVCFFAHTAEELRPLYVSTGSAVPSPRSSASAPNVMDMAAAMSLLPGSPSSVSSMSPSHFGQPMSPSANGMSLSSAWAQPNVSALHLPGSNLQSSRLRSSLSARDMPPDDLNMMSDLDGQQQHPLNDLSCYLQPRPGAGSVSRSGRSKILTPSNLEDLFSAEISSSPRYSDPAAGSVFSPTHKSAVLNQFQQLQSMLSPINTNLLSPKNVEHPLLQASFGVSPSGRMSPRSVEPISPMSSRISAFAQREKQQQQQQQLRSLSSRDLGANSPASLVGSPANPWSKWGSPNGKADWSVNGDTLGRQMRRSSSFELKNNGEEPDLSWVQSLVKESPPEMIKEKFASPMPTASADGPNSNSQIESIDHSVLGAWLEQMQLDQLVV

SEQ ID NO: 72930 - protein, 884 aa, Zea mays
  Clone ID: 700223363_FLI.pep
ASEKASAHLPSSLSRSAAAQNCLVMTNAAGTAPHPTPPTPLQQQQHQPPKDQQQKALALNAFRLKGIGDRIRFHLKGMSVPPVAELAHLIYAFARGIDFAVSAGDIPLTAGDIPEILRKVYELRKETIIQSSLMILAISCKNACSNKWFQPADSRDILRMVNELSGNFCTSTGQAASDSTVLEIISQIMPRYYPRLKFERLITSIEAKVGYDILMADFFIERSLSRDEKIRLIVVQKENLDASSCVSSPPHVSFLVNGKGVDKRTNVSMEQGPQLPTDITKMLKYGANIIQGVGYFNANYIIAVAVVNDLTSFSAPKLDDYAQPITVYPADSDVLEGPSRVSLNCPISFRRIKTPIKGRLCKHYQCFDYDNYMEMNSRKPNWRCPYCNTSSSFTDLRIDQKMMKILEETGDDVTDVLVFADGSWKVVPAQDEKSDRHRGDTIQQAGDAVETGSPSRDVIDLINGNDDGDMQMDWASAPEDSKPVLNSQDLSVSDYLTDFPMTAQTEDLNRGDGNNGGSNMASTSRQNLLLPPTSGLGSSSLGTLESILPQNVLHPVITDAVSPSLETSSASGMQHVSQETHCGTVQLQPQIGPVHGSEVRRLPIPRNPRREPIGVQGLTVPPQNPGSSTRLQPNILNCPPPIPLSSPSSSTYQAHQVKNPDSVIASRNSGSGPLPRTPSVAAASLHLQSTARDIRNTSSHLPSRVVGLPAPHLMGARPPPGISVQAGGANAYRTMQQTPTMDPLRHTRMSMNQTALAAAGQTTAAAYVRPTQADIQNHLFPVQQSQAPRSQQVPRTTTPPLQRAPPHLQPPSVPPTVPSTPQAGPSHGLPPELPVDDSWRPTGQMRGSLTGNAYSSAIRHYRGHSEQQQGEPRPPNTSGARRPQ

SEQ ID NO: 72931 - protein, 278 aa, Zea mays
  Clone ID: LIB3245-431-E4_FLI.pep
NHGKVKIGDFGLAMVMQQRKTQSIQGTLEFMAPELFGENYNELVDIYSFGMCMLEMVTGECPYSECQGFVQIYKKISEGVKPVALSKVKDAEVRSFIESCLASAADRLPASELLKSPFLMKDDIIINDKTSNPVQEPIAFPPNLDLDLEATPIFVSLLPNGTVDNGKGSFSLVLRRGGFVLEGDMSGSNPVNLLLRIPVPNDKCKNIEFAFDLENDTSLLVATEMVQELELPSWSMPIVAKLVDAFLLKTVRGWRPCVQVGQMIQAVQNTASVNGKSI

SEQ ID NO: 72932 - protein, 608 aa, Zea mays
  Clone ID: LIB4764-032-G12_FLI.pep
QAAAGDARREPQSEQATMCGILAVLGVAEVSLAKRSRIIELSRRLRHRGPDWSGLHCHEDCYLAHQRLAIIDPTSGDQPLYNEDKTVVVTVNGEIYNHEELKAKLKTHEFQTGSDCEVIAHLYEEYGEEFVDMLDGMFSFVLLDTRDKSFIAARDAIGICPLYMGWGLDGSVWFSSEMKALSDDCERFITFPPGHLYSSKTGGLRRWYNPPWFSETVPSTPYNALFLREMFEKAVIKRLMTDVPFGVLLSGGLDSSLVASVASRHLNETKVDRQWGNKLHTFCIGLKGSPDLKAAREVADYLSTVHHEFHFTVQEGIDALEEVIYHIETYDVTTIRASTPMFLMSRKIKSLGVKMVISGEGSDEIFGGYLYFHKAPNKKEFHEETCRKIKALHLYDCLRANKATSAWGVEARVPFLDKSFISVAMDIDPEWKMIKRDLGRIEKWVIRNAFDDDEGPYLPKHILYRQKEQFSDGVGYSWIDGLKDHASQHVSDSMMMNAGFVYPENTPTTKEGYYYRMIFEKFFPKPAARSTVPGGPSVACSTAKAVEWDASWSKNLDPSGRAALGVHDAAYEDTAGKTPASADPVSDKGLRPAIGESLGTPVASATAV

SEQ ID NO: 72933 - protein, 160 aa, Zea mays
  Clone ID: 700331888_FLI.pep
PEGEQPGGGGASSSRRWKMSYLLPHLHSGWAVDQAILAEEERLVIIRFGHDWDETCMQMDEVLAAVAETIKNFAVIYLVDITEVPDFNTMYELYDPSTVMFFFRNKHIMIDLGTGNNNKINWALKDKQEFIDIVETVYRGARKGRGLVIAPKDYSTKYRY

SEQ ID NO: 72934 - protein, 482 aa, Brassica napus
  Clone ID: LIB3034-017-E7_FLI.pep
KDRRMMTLNSLSPSAESISLCFLDTSRFTQTPKLPGGCSLRKRNQGRSFGKGVVKCSVKVQQQQPPPAWPGRAIPEPPRQSWDGPKPISIVGSTGSIGTQTLDIVAENPDKFRVVALAAGSNVALLADQVKRFKPALVAVRKESLVDELKDALAGLDYKPEIIPGEQGVIEVARHPDAVTVVTGIVGCAGLKPTVAAIEAGKDIALANKETLIAGGPFVLPLANKHNVKILPADSEHSAIFQCIQGLPEGALRKIILTASGGAFRDWPVEKLKEVKVADALKHPNWSMGKKITVDSATLFNKGLEVIEAHYLFGAEYDDIEIVIHPQSIIHSMIETQDSSVLAQLGWPDMRLPILYTMSWPDRVPCSEVTWPRLDLCKLGSLTFKKPDNVKYPSMDLAYAAGRAGGTMTGVLSAANEKAVEMFIDEKISYLDIFKVVELTCDKHRSELVTSPSLEEIVHYDLWAREYAANVQLSSGARPVPA

SEQ ID NO: 72935 - protein, 227 aa, Gossypium hirsutum
  Clone ID: LIB3825-032-G12_FLI.pep
ATTSSGGGSTTSGRRPRGRPAGSKNKPKSPIIVARDSPNSLRSHVLEISSGSDIVDSVSDYARRRGRGVCVLSGTGAVTNVTLRQPAAPPGSVVTLHGRFEILSLTGTSLPPPAPPGAGGLTVYLAGVQGQVVGGSVVGPLMASGPVVLMAASFANAVYDRLPLEEEDPPTVHEQQPAASQSSGLTGSGGGNNNNCGTTGTGVGGGGGGVPFYNLGPNMGTYPFPGL

SEQ ID NO: 72936 - protein, 251 aa, Zea mays
  Clone ID: LIB148-001-E3_FLI.pep
QHKNDCESRSGRSLEASGSLLGKAAFHSPSRVCSGLTRSIHDLLAEPSILPLLDISLFGPLSPLSLLGHSACILQQHLHLQSLLVSFLSLRLTAFCQHLLKPCSFHGDIPVWREPNILLHDQTRELVCEPGLKVLLQLRWVYGNEAHHLSRARTAGVRGHAGAGHAGSTAADAHGAQRHGAVAAQRGRRGAARVAEPGARVERPRLGSPVHGGVAVQAQPGVTAVAEDDGIMHSAGPAAVERQGHPPPRRR

SEQ ID NO: 72937 - protein, 381 aa, Glycine max
  Clone ID: LIB3028-014-C7_FLI.pep
KERTAELVRKSMASSLGFEFLTKKPYSPPSWASHLHPLPSHFFSLAHLPTPIHRWNLPNLPTNTELWIKRDDLSGMQLSGNKVRKLEFLMADAIAQGADSIITIGGIQSNHCRATAVAAKYLNLDCFLILRTSDLLVDQDPGLTGNLLVERMVGAHVHLISKQEYAKIGSVTLTNVLKEKLIKEGRRPYVIPVGGSNSLGTWGYIEAVREIEQQIQKGTGNVKFDDIVVACGSGGTIAGLSLGSSLSALKARVHAFSVCDDPDYFHNFAQGLLDGLKAGVSSRDIVHIQNAKGLGYAMNTSEELNFVKEVAATTGVVLDPVYSGKAAYAMLKDMSENPKKWERRKILFIHTGGLLGLYDKVDQLASFVGNWQRMDVNESVP

SEQ ID NO: 72938 - protein, 1431 aa, Homo sapiens
  Clone ID: LIB4119-007-G1_FLI.pep
LEKMSRAVRLPVPCPVQLGTLRNDSLEAQLHEYVKQGNYVKVKKILKKGIYVDAVNSLGQTALFVAALLGLRKFVDVLVDYGSDPNHRCFDGSTPVHAAAFSGNQWILSKLLDAGGDLRLHDERGQNPKTWALTAGKERSTQIVEFMQRCASHMQAIIQGFSYDLLKKIDSPQRLVYSPSWCGGLVQGNPNGSPNRLLKAGVISAQNIYSFGFGKFYLTGATQMAYLGSLPVIGEKEVIQADDEPTFSFFSGPYMVMTNLVWNGSRVTVKELNLPTHPHCSRLRLADLLIAEQEHSSKLRHPYLLQLMAVCLSQDLEKTRLVYERITIGTLFSVLHERRSQFPVLHMEVIVHLLLQISDALRYLHFQGFIHRSLSSYAVHIISPGEARLTNLEYMLESEDRGVQRDLTRVPLPTQLYNWAAPEVILQKAATVKSDIYSFSMIMQEILTDDIPWKGLDGSVVKKAVVSGNYLEADVRLPKPYYDIVKSGIHVKQKDRTMNLQDIRYILKNDLKDFTGAQRTQPTESPRVQRYGLHPDVNVYLGLTSEHPRETPDMEIIELKEMGSQPHSPRVHSLFTEGTLDPQAPDPCLMARETQNQDAPCPAPFMAEEASSPSTGQPSLCSFEINEIYSGCLILEDDIEEPPGAASSLEADGPNQVDELKSMEEELDKMEREACCFGSEDESSSKAETEYSFDDWDWQNGSLSSLSLPESTREAKSNLNNMSTTEEYLISKCVLDLKIMQTIMHENDDRLRNIEQILDEVEMKQKEQEERMSLWATSREFTNAYKLPLAVGPPSLNYIPPVLQLSGGQKPDTSGNYPTLPRFPRMLPTLCDPGKQNTDEQFQCTQGAKDSLETSRIQNTSSQGRPRESTAQAKATQFNSALFTLSSHRQGPSASPSCHWDSTRMSVEPVSSEIYNAESRNKDDGKVHLKWKMEVKEMAKKAATGQLTVPPWHPQSSLTLESEAENEPDALLQPPIRSPENTDWQRVIEYHRENDEPRGNGKFDKTGNNDCDSDQHGRQPRLGSFTSIRHPSPRQKEQPEHSEAFQASSDTLVAVEKSYSTSSPIEEDFEGIQGAFAQPQVSGEEKFQMRKILGKNAEILPRSQFQPVRSTEDEQEETSKESPKELKEKDISLTDIQDLSSISYEPDSSFKEASCKTPKINHAPTSVSTPLSPGSVSSAASQYKDCLESITFQVKTEFASCWNSQEFIQTLSDDFISVRERAKKLDSLLTSSETPPSRLTGLKRLSSFIGAGSPSLVKACDSSPPHATQRRSLPKELLKQQQGSSTVLHENTASDGGGTANDQRHLEEQETDSKKEDSSMLLSKETEDLGEDTERAHSTLDEDLERWLQPPEESVELQDLPKGSERETNIKDQKVGEEKRKREDSITPERRKSEGVLGTSEEDELKSCFWKRLGWSESSRIIVLDQSDLSD

SEQ ID NO: 72939 - protein, 1109 aa, Homo sapiens
  Clone ID: LIB4119-145-F11_FLI.pep
SLSARNSVLGGKMSFFNFRKIFKLGSEKKKKQYEHVKRDLNPEDFWEIIGELGDGAFGKVYKAQNKETSVLAAAKVIDTKSEEELEDYMVEIDILASCDHPNIVKLLDAFYYENNLWILIEFCAGGAVDAVMLELERPLTESQIQVVCKQTLDALNYLHDNKIIHRDLKAGNILFTLDGDIKLADFGVSAKNTRTIQRRDSFIGTPYWMAPEVVMCETSKDRPYDYKADVWSLGITLIEMAEIEPPHHELNPMRVLLKIAKSEPPTLAQPSRWSSNFKDFLKKCLEKNVDARWTTSQLLQHPFVTVDSNKPIRELIAEAKAEVTEEVEDGKEEDEEEETENSLPIPASKRASSDLSIASSEEDKLSQNACILESVSEKTERSNSEDKLNSKILNEKPTTDEPEKAVEDINEHITDAQLEAMTELHDRTAVIKENEREKRPKLENLPDTEDQETVDINSVSEGKENNIMITLETNIEHNLKSEEEKDQEKQQMFENKLIKSEEIKDTILQTVDLVSQETGEKEANIQAVDSEVGLTKEDTQEKLGEDDKTQKDVISNTSDVIGTYEAADVAQKVDEDSAEDTQSNDGKEVVEVGQKLINKPMVGPEAGGTKEVPIKEIVEMNEIEEGKNKEQAINSSENIMDINEEPGTTEGEEITESSSTEEMEVRSVVADTDQKALGSEVQDASKVTTQIDKEKKEIPVSIKKEPEVTVVSQPTEPQPVLIPSININSDSGENKEEIGSLSKTETILPPESENPKENDNDSGTGSTADTSSIDLNLSISSFLSKTKDSGSISLQETRRQKKTLKKTRKFIVDGVEVSVTTSKIVTDSDSKTEELRFLRRQELRELRFLQKEEQRAQQQLNSKLQQQREQIFRRFEQEMMSKKRQYDQEIENLEKQQKQTIERLEQEHTNRLRDEAKRIKGEQEKELSKFQNMLKNRKKEEQEFVQKQQQELDGSLKKIIQQQKAELANIERECLNNKQQLMRAREAAIWELEERHLQEKHQLLKQQLKDQYFMQRHQLLKRHEKETEQMQRYNQRLIEELKNRQTQERARLPKIQRSEAKTRMAMFKKSLRINSTATPDQDRDKIKQFAAQEEKRQKNERMAQHQKHE

SEQ ID NO: 72940 - protein, 68 aa, Zea mays
  Clone ID: LIB4737-002-F10_FLI.pep
NPLFCFHDSQTVKGSTVPHTPFGYSPFYVQNIKQLKPVSQRVTSLELQHSASKDGLSFPDLLLWSNDE

SEQ ID NO: 72941 - protein, 236 aa, Glycine max
  Clone ID: 701206635_FLI.pep
RMGRSPCCEKAHTNKGAWTKEEDHRLISYIRAHGEGCWRSLPKAAGLLRCGKSCRLRWINYLRPDLKRGNFSLEEDQLIIKLHSLLGNKWSLIAGRLPGRTDNEIKNYWNTHIRRKLLSRGIDPATHRPLNDSSHQEPAAVSAPPKHQESFHHERCPDLNLELTISPPHHPQPDHPHLKTLVTNSNLCFPCSLGLHNSKDCSCALHTSTANATATGYDFLALKTTVVLDYRTLHMK

SEQ ID NO: 72942 - protein, 213 aa, Glycine max
  Clone ID: 701151737_FLI.pep
EREMGRSPCCEKAHTNKGAWTKEEDHRLISYIRAHGEGCWRSLPKAAGLLRCGKSCRLRWINYLRPDLKRGNFTLEEDQLIIKLHSLLGNKWSLIARRLPGRTDNEIKNYWNTHIRRKLLSRGIDPATHRPLNDDKVLERCPDLNLELTISPPRQPQSDQHHLKPVGRNSNLCFACSLGLQNSKDHCSCALNTANAASGHDFLALKTSVLEMK

SEQ ID NO: 72943 - protein, 590 aa, Homo sapiens
  Clone ID: LIB4649-040-A1_FLI.pep
ENVSDILGRSRGRAGSERPRDSPSLEPCPPRSPPVRRAPDIATLHPRDCPTPGPRGSAASLPPPTPAATAQFPQPDPVCRSQSLQAASGTFGGPVGRPGRAGTEPPRLGQWAWAGAVAEDLARPLQTPGDSHTAAAMATNKERLFAAGALGPGSGYPGAGFPFAFPGALRGSPPFEMLSPSFRGLGQPDLPKEMASLSVETQSTSSEEMVPSSPSPPPPPRVYKPCFVCNDKSSGYHYGVSSCEGCKGFFRRSIQKNMVYTCHRDKNCIINKVTRNRCQYCRLQKCFEVGMSKEAVRNDRNKKKKEVKEEGSPDSYELSPQLEELITKVSKAHQETFPSLCQLGKYTTNSSADHRVQLDLGLWDKFSELATKCIIKIVEFAKRLPGFTGLSIADQITLLKAACLDILMLRICTRYTPEQDTMTFSDGLTLNRTQMHNAGFGPLTDLVFAFAGQLLPLEMDDTETGLLSAICLICGDRMDLEEPEKVDKLQEPLLEALRLYARRRRPSQPYMFPRMLMKITDLRGISTKGAERAITLKMEIPGPMPPLIREMLENPEMFEDDSSQPGPHPNASSEDEVPGGQGKGGLKSPA

SEQ ID NO: 72944 - protein, 590 aa, Homo sapiens; identical to SEQ ID NO: 72943
  Clone ID: LIB4651-010-C11_FLI.pep

SEQ ID NO: 72945 - protein, 495 aa, Homo sapiens
  Clone ID: LIB4806-059-H10_FLI.pep
TTNIQQGHFLKRESAFNEMTMVDTEMPFWPTNFGISSVDLSVMEDHSHSFDIKPFTTVDFSSISTPHYEDIPFTRTDPVVADYKYDLKLQEYQSAIKVEPASPPYYSEKTQLYNKPHEEPSNSLMAIECRVCGDKASGFHYGVHACEGCKGFFRRTIRLKLIYDRCDLNCRIHKKSRNKCQYCRFQKCLAVGMSHNAIRFGRMPQAEKEKLLAEISSDIDQLNPESADLRALAKHLYDSYIKSFPLTKAKARAILTGKTTDKSPFVIYDMNSLMMGEDKIKFKHITPLQEQSKEVAIRIFQGCQFRSVEAVQEITEYAKSIPGFVNLDLNDQVTLLKYGVHEIIYTMLASLMNKDGVLISEGQGFMTREFLKSLRKPFGDFMEPKFEFAVKFNALELDDSDLAIFIAVIILSGDRPGLLNVKPIEDIQDNLLQALELQLKLNHPESSQLFAKLLQKMTDLRQIVTEHVQLLQVIKKTETDMSLHPLLQEIYKDLY

SEQ ID NO: 72946 - protein, 621 aa, Homo sapiens
  Clone ID: LIB4656-018-D2_FLI.pep
PLSAGEDMTTLDSNNNTGGVITYIGSSGSSPSRTSPESLYSDNSNGSFQSLTQGCPTYFPPSPTGSLTQDPARSFGSIPPSLSDDGSPSSSSSSSSSSSSFYNGSPPGSLQVAMEDSSRVSPSKSTSNITKLNGMVLLCKVCGDVASGFHYGVHACEGCKGFFRRSIQQNIQYKRCLKNENCSIVRINRNRCQQCRFKKCLSVGMSRDAVRFGRIPKREKQRMLAEMQSAMNLANNQLSSQCPLETSPTQHPTPGPMGPSPPPAPVPSPLVGFSQFPQQLTPPRSPSPEPTVEDVISQVARAHREIFTYAHDKLGSSPGNFNANHASGSPPATTPHRWENQGCPPAPNDNNTLAAQRHNEALNGLRQAPSSYPPTWPPGPAHHSCHQSNSNGHRLCPTHVYAAPEGKAPANSPRQGNSKNVLLACPMNMYPHGRSGRTVQEIWEDFSMSFTPAVREVVEFAKHIPGFRDLSQHDQVTLLKAGTFEVLMVRFASLFNVKDQTVMFLSRTTYSLQELGAMGMGDLLSAMFDFSEKLNSLALTEEELGLFTAVVLVSADRSGMENSASVEQLQETLLRALRALVLKNRPLETSRFTKLLLKLPDLRTLNNMHSEKLLSFRVDAQ

SEQ ID NO: 72947 - protein, 621 aa, Homo sapiens; identical to SEQ ID NO: 72946
  Clone ID: LIB4803-009-H3_FLI.pep

SEQ ID NO: 72948 - protein, 234 aa, Glycine max
  Clone ID: LIB3242-681-C2_FLI.pep
GRSPCCEKAHTNKGAWTKEEDHRLISYIRAHGEGCWRSLPKAAGLLRCGKSCRLRWINYLRPDLKRGNFSLEEDQLIIKLHSLLGNKWSLIAGRLPGRTDNEIKNYWNTHIRRKLLSRGIDPATHRPLNDSSHQEPAAVSAPPKHQESFHHERCPDLNLELTISPPHHPQPDHPHLKTLVTNSNLCFPCSLGLHNSKDCSCALHTSTANATATGYDFLALKTTVVLDYRTLHMK

SEQ ID NO: 72949 - protein, 214 aa, Glycine max
  Clone ID: LIB3109-019-D11_FLI.pep
LEREMGRSPCCEKAHTNKGAWTKEEDHRLISYIRAHGEGCWRSLPKAAGLLRCGKSCRLRWINYLRPDLKRGNFTLEEDQLIIKLHSLLGNKWSLIAGRLPGRTDNEIKNYWNTHIRRKLLSRGIDPATHRPLNDDKVLERCPDLNLELTISPPRQPQSDQHHLKPVGRNSNLCFACSLGLQNSKDHCSCALNTANAASGHDFLALKTSVLEMK

SEQ ID NO: 72950 - protein, 344 aa, Zea mays
  Clone ID: LIB4744-081-A2_FLI.pep
FNDAYLYLYVLALLQRLEKPEARQRRRGLAAAGLAAADTEVVAQADGRPPPLLLRGRRRLGRRAHGQVQVQVEVGAARRVRARAAAAVAVLRRRRAHEDRIGRDDDGGRGRGRGPGPGRRRGGREAGGAGRGGERAARAAAERAVRLRVDAAAEQLALDVRVPVVLDLVVRPAGQLPRDERPLVAEQGVELDDELVVVAGEVAALEVRAEVVHPAEPAALAAAEESRGLGQRAPAPFAVRPDVGDQALVLLLGPGALVRVRLLAARRPPHAWFSLVCLLARASPEFAWKLLLSSGLVWFGCYYNRGKRKEISQGRRVGTDRGCSASATEGIHMGAGQQAGAQWV

SEQ ID NO: 72951 - protein, 352 aa, Zea mays
  Clone ID: LIB4744-132-G9_FLI.pep
GSLPLFCSPFAKGSQQNHAIDRRHQSSILRSTTYSHPLRQQRGLSVCARAWLSSISAWRAAGMGRSPCCEQAHTNKGAWTKEEDQRLVAYIKAHGEGCWRSLPKAAGLLRCGKSCRLRWINYLRPDLKRGNFTEEEDDLIIKFHELFGNKWSLIAGRLPGRTDNEIKNYWNTHIKRKLLARGMDPQTHRPLASATAGQQHYQLQEPQKQAAGGGPAGHPHQDHLEVVVISNSPDEAYSRSSDDEPRSATPPRRHLDIDLNLSISLAAYQPPEEAGIMKQPLVMKQEQETAAGGTGTNAAAVCLCLNSLGYRPGVECVCGDGSSSSSSSHSHSHSHQWALNFLQAAAPCYRGQ

SEQ ID NO: 72952 - protein, 349 aa, Zea mays
  Clone ID: LIB4743-106-G11_FLI.pep
AFVLFSIRERLAAKPRHRSPPPVQHPPIDYVLPPTPAAARPLCLCAAWLSSIPAWRAAGMGRSPCCEQAHTNKGAWTKEEDQRLVAYIKAHGEGCWRSLPKAAGLLRCGKSCRLRWINYLRPDLKRGNFTEEEDDLIIKFHELFGNKWSLIAGRLPGRTDNEIKNYWNTHIKRKLLARGMDPQTHRPLAIATAGQQHYQLQEPQKRAAGGGPAGHPHQDHLEVVVISNSPDEAYSRSSDDEPRSATPPRRHLDIDLNLSISLAAYQPPEEAGIMKQPLVMKQEQETAAGGTGTNAAAVCLCLNSLGYRPGVECVCGDGSSSSSSSHSHSHSHQWALNFLQAAAPCYRGQ

SEQ ID NO: 72953 - protein, 353 aa, Zea mays
  Clone ID: LIB4742-105-H1_FLI.pep
PRLLAFVLFSIRERLAAKPRHRSPPPVQHPPIDYVLPPTPAAARPLCLCAAWLSSISAWRAAGMGRSPCCEQAHTNKGAWTKEEDQRLVAYIKAHGEGCWRSLPKAAGLLRCGKSCRLRWINYLRPDLKRGNFTEEEDDLIIKFHELFGNKWSLIAGRLPGRTDNEIKNYWNTHIKRKLLARGMDPQTHRPLAIATAGQQHYQLQEPQKRAAGGGPAGHPHQDHLEVVVISNSPDEAYSRSSDDEPRSATPPRRHLDIDLNLSISLAAYQPPEEAGIMKQPLVMKQEQETAAGGTGTNAAAVCLCLNSLGYRPGVECVCGDGSSSSSSSHSHSHSHQWALNFLQAAAPCYRGQ

SEQ ID NO: 72954 - protein, 348 aa, Zea mays
  Clone ID: LIB4573-004-D2_FLI.pep
VPPNPNPTAPADLTPPSASAARKLPIKRRSPRPSSSPPSSSSPASSDPLRAPGGGSDQQQPPFKFQRIWSESDELRFLQGLLGCGTQGLVFPRDLNVFYDRFSESMPQPYIRAQLSEKLRRLKNKFRSMSARVAGGIDPARLAPHDRDVLHLCSRLWDPANAATSPFAASAGTTGNKRRRSNPRGTPLPPPDASGDSNSHDYNGISSSAPGLFPDGSNGEVTFYLEQESGQLGNHEGAALVADSKFDVVVQEQPEAVVTLPNGNNGIGSEMSAECKTVVPCSNEHRMANAVLDVFEECLREAKSNGIINGGNAESELSKRWRAQRMDELDVLSRRLRLLVEYAAAAGH

SEQ ID NO: 72955 - protein, 98 aa, Zea mays
  Clone ID: LIB3587-197-C2_FLI.pep
STSLLCASLMHDTHVARTSLLRRRLHAADGHVRCHPTSELPPLWFHRSVDLGAVDGGADGHADGDAALAGDVGGVGHADAAAEPARHALEAVAGGLPV

SEQ ID NO: 72956 - protein, 50 aa, Zea mays
  Clone ID: LIB4338-011-C7_FLI.pep
LITNCRQVIVLHSIIQILNWNQTKCSMNRAPKTCTGRILISRALKTQNTG

SEQ ID NO: 72957 - protein, 291 aa, Zea mays
  Clone ID: LIB3279-210-C6_FLI.pep
DPVFSFWFNRHAGEGEGGEIVFGGMDSSHYKGDHTYVPVTQKGYWQFNMGDVLVDGKSTGFCAGGCAAIADSGTSLLAGPTAIITEINEKIGAAGVVSQECKTVVSQYGQQILDLLLAETQPAKICSQVGLCTFDGTHGVSAGIRSVVDDKAGKSNGGLKSDPMCNACEMAVVWMQNQLAQNKTQELILTYINQLCERLPSPMGESAVDCASLGSMPDIAFTIGGKKFKLKPEQYILKVGEGQAAQCISGFTAMDIPPPRGPLWILGDVFMGVYHTVFDYGKLRVGFAESA

SEQ ID NO: 72958 - protein, 571 aa, Zea mays
  Clone ID: LIB4702-001-G6_FLI.pep
QRGEKMAPLLAAAMNHAAAHPGLRSHLVGPNNESFSRHHLPSSSPQSSKRRCNLSFTPRSARVGSQNGVQMLSPSEIPQRDWFPSDFTFGAATSAYQIEGAWNEDGKGESNWDHFCHNHPERILDGSNSDIGANSYHMYKTDVRLLKEMGMDAYRFSISWPRILPKGTKEGGINPDGIKYYRNLINLLLENGIEPYVTIFHWDVPQALEEKYGGFLDKSHKSIVEDYTYFAKVCFDNFGDKVKNWLTFNEPQTFTSFSYGTGVFAPGRCSPGLDCAYPTGNSLVEPYTAGHNILLAHAEAVDLYNKHYKRDDTRIGLAFDVMGRVPYGTSFLDKQAEERSWDINLGWFLEPVVRGDYPFSMRSLARERLPFFKDEQKEKLAGSYNMLGLNYYTSRFSKNIDISPNYSPVLNTDDAYASQEVNGPDGKPIGPPMGNPWIYMYPEGLKDLLMIMKNKYGNPPIYITENGIGDVDTKETPLPMEDALNDYKRLDYIQRHIATLKESIDLGSNVQGYFAWSLLDNFEWFAGFTERYGIVYVDRNNNCTRYMKESAKWLKQFNAAKKPSKKILTPA

SEQ ID NO: 72959 - protein, 306 aa, Zea mays
  Clone ID: LIB4759-001-H5_FLI.pep
SSSAAHGLQELLEELMQCMAQPNVSDLFPFLSALDLQGCRRRVAVQLGQVLQVLDDITDRRLASSSSSSTSSKGGDRRDDFLDILLDLQSTGKITRDNVTLTLFDIFAAGSDTMALTVVWAMAELLRNPGVMARLRAEVRDALGGKDAVEEADAAGLPFLQAVVREAMRLHPAAPVLLPHKAVEDGVQIGGYAVPRGCTVIFNSWAIMRDPAAWERPDEFLPERFLARDLDFRGKQLEFVPFGSGRRLCPGVPMAERVVPLVLASLVHAFQWQLPAGMSADQVDVSDKFTTTSVLAFPPIKAVPLL

SEQ ID NO: 72960 - protein, 286 aa, Zea mays
  Clone ID: LIB4738-103-C8_FLI.pep
DSAIPQGPPFSDTTATAVVEYLGSDTDPTTPPTLPPRPEVNDTATAFRFLSNLTALVRPGQPTVPLSVDTRMFVTVGLGVSDCQPTQLLCNRSATVFSSSMNNASFVLPAPGKPSMLQAHYDGGDTAGVYTRDFPDRPPLVFDYTADASDTAALQYTAKSTRVRTLRFNETVEMVLQNTRLIARESHPMHLHGFNFYVLAQGFGNYDEATATPRFNLVNPQERNTVAVPTGGWAVIRFLANNPGMWFMHCHFDNHLDLGLAMVFEVPDGPTPETSVPPPPADLPQC

SEQ ID NO: 72961 - protein, 456 aa, Euglena gracilis
  Clone ID: LIB147-009-E3_FLI.pep
FFSSQTMSRWSSCQEFLKHVESRNPGQPEFMQAVTEVIESLWPFIEKNPKYADASLLERIVEPERVVMFRVCWMDDKGVVQVNKGYRIQHSMAIGPYKGGLRFHPSVNLSILKFLAFEQTFKNALTTLPMGGGKGGSDFDPKGKSKNEVMRFCQAFASELFRHVGADTDVPAGDIGVGGREVAFIAGQYKKLTNCADCVFTGKGLTFGGSLIRPESTGYGCVYFAQEMLATKGLSFQGLRVSISGSGNVAQYATEKCMELGAKVVTVSDSSGTIVDEDGFTPEKLAILMRVKNEQYGRVTDYVQQAGGNIKFLPGARPWGVKADVALPCACENELDENDAKTLIANGVKCVAEGANMPSTIAAAKAFEAAGVLYAPGKASNAGGVATSGLEMSQNAMRLTWTRAEVDQKLHGIMKSIHAACVQHGKRADGTVSYIDGANIAGFVKVAEAMLAQGVL

SEQ ID NO: 72962 - protein, 101 aa, Zea mays subsp. mexicana
  Clone ID: UC-ZMROTEOSINTE115G07_FLI.pep
RRTMLPYLSIYTVTARVVSDRSLSMCIAYTYKIHTYSASLTAYASGSSYRTIGSDTHSQRSQSKPTYTIYIHTCYVLSVYGRPDRHIRLQVVVRRPVVGRS

SEQ ID NO: 72963 - protein, 538 aa, Zea mays
  Clone ID: LIB4172-025-A8_FLI.pep
SPGATMTSAQKLVVARQLARLGVDIIEAGFPASSPDDLDAVRSIAIEVGNPAPGPAGEEDAVHVPVICGLSRCNRKDIDAAWEAVRHARRPRIHTFIATSDIHMQHKLRKTPDQVVAIAREMVAYARSLGCTDVEFSPEDAGRSNREFLYHILGEVIKAGATTLNIPDTVGYNLPYEFGKLIADIKANTPGIEKAIISTHCQNDLGLATANTLAGARAGARQLEVTINGIGERAGNASLEEVVMAIKCRRELLDGLYTGIDSRHITLTSKMVQEHSGLHVQPHKAIVGANAFAHESGIHQDGMLKYKGTYEIISPDDIGLTRANEFGIVLGKLSGRHAVRSKLVELGYEIGDKEFEDFFKRYKEVAEKKKRVTDEDLEALLSDEIFQPKVIWSLADVQATCGTLALSTATVKLVAPDGEEKIACSVGTGPVDAAYKAVDKIIQIPTVLREYSMTSVTEGIDAIATTRVVVTGDVSNNAKHALTGQSFNRSFSGSGASMDIVVSSVRAYLSALNKICSFAGAVKASSDVAETASVPSTE

SEQ ID NO: 72964 - protein, 378 aa, Zea mays
  Clone ID: LIB3912-022-C12_FLI.pep
STMTQNCILLSGRRSSWERLILDDRTVVGVGHPVGGDDMVSHQRLAGLVRNAQGEWRGEAVAGVEPPDGSPGLAHRRPRRRVGLHEVHLHRVAVAVFELDQHREVDGVGALLDVERHLLPGVVAGHPLELDVDDAGVAELVVAAGLGHGAERRAAEVEVVLGHGVVVHVSDDHRLWVAGAGRVVLASYLVAGAAALAVLEQGLVAARRHCRERRQIHVLESTGTTVVMMAKCDPRHGKYMACCLMYRGDVVPKDVNAAVATIKTKRTIQFVDWCPTGFKCGINYQPPSVVPGGDLAKVQRAVCMISNSTSVVEVFSRIDHKFDLMYAKRAFVHWYVGEGMEEGEFSEAREDLAALEKDYEEVGAEFDEGEDGDEGDEY

SEQ ID NO: 72965 - protein, 427 aa, Zea mays
  Clone ID: LIB3608-034-A10_FLI.pep
LQKQLAMAAAAAAAAFDAYTDKNAIFRRLKAKPENKMCFDCNAKNPTWASVTYGIFLCLDCSAVHRSLGVHITFVRSTNLDSWTPDQLKMMAFGGNNRAHAFFKQHGWTDGGKVEAKYTSRAAELYRQMLNKEVAKSAITDNALPSSPVTASEASKPSDDFPEFKLSDAPAPPAENLNGKHEPKSPKAAPRSPKAATHPTFATSVKKPIGAKKVGGKTGGLGVRKLTTKPNESLYEQKPEEPKPAIPALTAPTAKGGPSLHSRFEYVDNEQSSVSRTGGSGSRVTGHVAPPKSSDFFQEYGMGNGFQKKSSNASKAQIEETDEARKKFSNAKAISSSQFFGTQNREEKEAQLSLQKFAGSSSISSSDLFGRTNVDDSNLDLSAADLINRISFQASQDLSSLKDIAGETGKKLTSFASNFISDLDRIL

SEQ ID NO: 72966 - protein, 420 aa, Zea mays
  Clone ID: LIB4759-105-B10_FLI.pep
IYPTTSTSALVSSSHERNTIHPPVRSGGDRQPAAEMSGRGKGGKGLGKGTPRVPFSSLFLNVAGAPASCLSPPASDREGIGMASHHSEPLDPADADDPSDNNPELPCPSYHIVTKPGQLPVEFLEPPATQKLVIGFDCEGVDLCRNGALCIMQLAFPDAVYLVDAIEGGKELIQACKPALESDHITKVIHDCKRDSEALYFQFGIKLHNVMDTQIAYSLIEEQEQEGKKMTSDDYNYISFVSLLADKRYCGILYPEKEEVRTLLRQDPNFWTIRPLSDMMVRAATDDVRFLLSIYAKMMEKLSKVSLWRLAVRSELYCRCFCLSDNQFADWSPLPPVPDDIEADVYVPEADILSVLDVPPGKMGRVIGRKGSTIMAVKECCKVEIHIGGAKGPPDRVFIIGPEKEVRKAEAIFRGRMLEF

SEQ ID NO: 72967 - protein, 347 aa, Zea mays
  Clone ID: LIB4171-013-E9_FLI.pep
LELDRLDTLELEGVIHGGGIEQAGALDSMVEVAVVVEQPRLDRRQRHLLMGRRHARLRLVLEDRPTTSGRRRGRCDGGATVRHLRRVRGSRGRALGTAGGARGPAAADLPASPPVQHPRDVLRGEDVRPRGDGGRWRQRGALRRARRARSRAVTAARARASARRVGGGVALQLRLEVVERGEGLAKRAARQVDVRLQPPLPLPLGRRRRPVRRRLGRPVAAALQLALEVRVPVVLDVVVRPLRQVRRDGRPPVAEEGLEVHDELLLLLGEVAALDARPQVVGPPQTAALAAPHQPGSGRDGAPVAGAVLLDVGDEDEVLLRRPGPLLDALLVAARRPHHGVSVLIND

SEQ ID NO: 72968 - protein, 297 aa, Zea mays
  Clone ID: LIB4074-020-F7_FLI.pep
DRHHLEAAASAPLRPTLERDCPDDHLVVDGSQRSADEGADPEDPVVSPGMVLVVNHGGAKAPRGVDAGAGDRDGGQVDEEHGKPDWKRGEDRHMGVPGVPLGVGGGEDGVDEDEGADDLGAEAVALGVAGRDDVGAAAVAHVQPLLEPLDDARAADGAQALHDDVKHRPGEGQLPRQEQPEGHRRVDVPAGDAGGAVDEGEDHAAEGPGDALDADGGALGGGLGDAHDGEDGDVEEEEGGDELGDAGAVEGPGLELPGLEERRRRGLLVVLVVRALRRRADGLALRELVGAQADVLL

SEQ ID NO: 72969 - protein, 243 aa, Zea mays
  Clone ID: LIB3594-011-E2_FLI.pep
PCFNCLTKKKSELLLPQPSACLAAARFPGAVAQARRRRRGGRVRRTNGQVEVEVGAPRLPRAAAAAAAAAAAAPAVVGRLRRLRLRLRGGGRDEGCCCHVVQRLRAVVRVRVDAAGQELAFDVRVPVVLDLVVRPARQLPGDQRPLVAEEGVQADDELVLVVGEVPALEVRPEVVHPPQPAALAAAQQTRRAGQRPPAPFPVRPDVRHQPLVLLLGPRALVGVPLLAARRPPHGSLPLPEARS

SEQ ID NO: 72970 - protein, 231 aa, Zea mays
  Clone ID: LIB3060-109-A5_FLI.pep
CSWQLQAAVRLQTTARGFLARRQVQSLRGEKHLAVASRATPWPSSHEQAVVRLQAAVRGFLVRRAVRKLHLLISSSLHQLAACAPNQQVSSILFEPPAEVEIWVCSPPARPKRVVSFIRATALVLDRPNIRTDRFLFHLSSNVKSAVQLFPWDPGGQEDIAAVQIYILVSQLFCIFVLNNKGKPRCKRLNLKSCQVSLWQLEDELVLKGGGDVMGIIGSETQQPGWDKARE

SEQ ID NO: 72971 - protein, 155 aa, Zea mays
  Clone ID: LIB143-040-C12_FLI.pep
SLKGRVLMDLGSGAPQRIASMTLSNLLPFGTLNFLQMTQHNVGALVVVKPGQNKSIAGIVTERDYLRKIIVQGRSSKSTKVGDIMTEENKLITVNPDTKVLQAMQLMTENRVRHIPVIDGTGMLGMVSIGDVVRAVVAEHREELNRLNDYIQGGY

SEQ ID NO: 72972 - protein, 195 aa, Zea mays
  Clone ID: LIB143-051-A12_FLI.pep
RRRCRSRRRGARTRPSTSSASWRSRASTASSGTRRTRPGAWASAPRRPSPGAAASTPGRAPAASSRTSSTRRRPPSTPTTPTTRRRRREGRRTWTTRRRPGRWSSGRWRSLRSPRAGTASPGSTSRRACSRTRSSKKTCLFWIRLDSKTVCQCVRVCSVQRVHVNSALINLLLLIFLLISNMNRWLIFGWTLLSA

SEQ ID NO: 72973 - protein, 325 aa, Zea mays
  Clone ID: LIB143-025-C3_FLI.pep
IQSIPATTGKGNPKGAAMGSRYEVEVTVGSASNLKNVNWRNGDLQPYAVLWVDDGPKCSTRVDPDNGEDPVWDEKVVVPVLPASAARLGDAVLHIDVVHAAGDDADAGVKPLVGSARLPLRDVLDDAGGVGGARVSRTLRLKRPRAARRAGSRPASPSARPRRRRATTTRTRTRRPRTGTPPPPVTRTTRRRRCTAGSRRTPRRRWGTRPTLLLPTAVVMAMELLLRRRTALRLLHYLPSSRRAARWGWGRGWPWAPRRGCWAASRWRKGRATWRTSSRIASPRGWRRRRSATETTTTITRMKQVGEEIMIMHTEPKSRQQVEVE

SEQ ID NO: 72974 - protein, 879 aa, Glycine max
  Clone ID: LIB3056-009-E10_FLI.pep
SKPWLYPAPTYRTIETFWVTDEDAPGPRCGHTLTAVAATKTQGPRLILFGGATAIEGGSSSAPGIRLAGVTNTVHSYDVQSRKWTSIKPAGEPPSPRAAHAAAAVGTMVVFQGGIGPAGHSTDDLYVLDLTNDKYKWHRVVVQGQGPGPRYGHVMDLVAQRYLVTVSGNDGKRVVSDAWAFDTAQKPYVWQKLNPEGDRPSARMYATASARSDGMFLLCGGRDSSGAPLADAYGLLMHRNGQWEWTLAPGVSPSPRYQHAAVFVGARLHVTGGVLRGGRSVEGEASIAVLDTAAGVWLDRNGIVSSSRSNKGHDYDPSLELMRRCRHAAAAVGVHIFIYGGLRGDILLDDFLVAENSPLQPDINSPERASPVTSSKQNQSNLNYNVTTPNLDGGPDIPSSGGSGMDKNSLEKLREASAAEAEAASAVWQAVQAISSNPAEETSVSDDNSQAVETVSDGSDTEGDVRLHPRAVVVAKEALGNLGGMVRQLSLDQFENESRRMIPVNNDLPYPTKKFTRQKSPQGLHKKIISTLLRPRNWKAPANRRFFLDSYEVGELCYAAEQIFMHEPTVLQLKAPVKVFGDLHGQFGDLMRLFDEYGFPSTAGDITYIDYLFLGDYVDRGQHSLETITLLLALKIEYPENVHLIRGNHEAADINALFGFRIECIERMGENDGIWAWTRFNQLFNYLPLAALIEKKIICMHGGIGRSINSVEQIEKLERPITMDTGSITLMDLLWSDPTENDSVEGLRPNARGPGLVTFGPDRVTEFCKKNKLQLIIRAHECVMDGFERFAQGQLITLFSATNYCGTANNAGAILVVGRGLVVVPKLIHPIPPPLQSPETSPERVMDETWMQELNIQRPPTPTRGRPQPDLDRGSLAYI

SEQ ID NO: 72975 - protein, 190 aa, Zea mays
  Clone ID: LIB3060-094-A8_FLI.pep
CFLIYTNQTRAPDHSSPSPATCAHSQPPAPHVPARRAPPLSHPPAFLSRARRRPSMAATFTVAARLPLRGPARAPSRPAVAAVTRLRSRQERRGLAATGGRGPARVRAETFSGGGGVGRRDPMAPPYNVLITGSTKGIGYALARKFLEAGDNVIICSRSAQKVESVVGDLKEEYGEQHVELSVMLEMERM

SEQ ID NO: 72976 - protein, 228 aa, Zea mays
  Clone ID: LIB3079-058-D6_FLI.pep
YTGTANQQYPSGPSASYPSGPPTTFHQPVSPVQYQPVAPPVSSFGPSAPVPATVPNQMFPHSAAANSTSRFMPSNNQSFAPRPGLSPAQPLSPTQVQAQPAPPAPPPTVQTADTTKVSAELRPVIGTLTRLFDETSKALGGSQATQAKKREIEDNSRKIGALFSKLNSDDISPNVASKLRQLCSAIDASDFATAMHLQVLLTTSDWDECNFWLAALKRMIKTRQNFRM

SEQ ID NO: 72977 - protein, 179 aa, Zea mays
  Clone ID: LIB3150-008-B2_FLI.pep
SSTPPSCSLAGGTAIDLTLQLKHGLKLVTQVIEVNLHCLQCLEAPIFALLLTGFAELNASVLNLLSTNTCTASFELMHKGVNPVKIHVGLLQQFGQLSDDPLAVLAEERDDLGDEVRSTGVLEHLELLELIVKQTRGVHVADEGGELVGGRHGGSCCVEHRAGEERRSSELVVGNPRAG

SEQ ID NO: 72978 - protein, 343 aa, Zea mays
  Clone ID: LIB3180-001-C5_FLI.pep
SIDPRLGRMEASAAAGGGGGSAATRSSPAAVQATNDDAAASKLSCVNKGYMKDDYVRFFVRRPTRRAPIINRGYYARWSVLRTLLHQFLNAGKNSNNDKPKQILSLGAGFDTTFFQLQDEGMAPHCYVELDFKEVTSKKAAIINHYSEMKEKLGSEASISIEKGEVISTHYKLFSADIRDIPKLDSVIRMAEMDPSLPTFIIAECVLIYLDPTATGAIVSWASQKFSTAVFFLYEQIHPDDAFGEQMIRNLESRGCPLLGINATPTLSHKEKLFLGNGWQRAVAWDMLKIYNDFIDSQERRRIERLELFDEFEEWYMMQEHYCVAYGINDAEGIFDSFGFGET

SEQ ID NO: 72979 - protein, 207 aa, Zea mays subsp. mexicana
  Clone ID: UC-ZMROTEOSINTE107B08_FLI.pep
YLPSVRNSIHRRRSAVSSLRWRRGKGTRTEQKAMDTMRGALERAKMLVGMEVDEESALPPPEEQSFFDDINRHCTLNTTQRLYGFAICLAAGLTCTFLSMLVFFNPVKFGVAFTLGNLMALGSTAFLIGPKRQFDMMLDSVRIYATAIYIASIIIALFCAIYVRSKLLTLVAIILEFGALIWYSLSYIPFARSIVSKVMTSCFDTDF

SEQ ID NO: 72980 - protein, 180 aa, Zea mays subsp. mexicana
  Clone ID: UC-ZMROTEOSINTE023A03_FLI.pep
YFVARLCIEQAYPVKNPGSTTSQAMAAAEAWVRQEKVRKFEEFVDQRLKPDLANAIAQRNKVFEQQKTFLDLKRNIENLERNGVTSMRSMVNLGSEVYMQAEVPDTRHIFVDIGLGFHVEFTWQEALQFISVREARLTRQIDEYTHLIANIKAQIKLVCEGIREVLQLPAEKELSSRNTW

SEQ ID NO: 72981 - protein, 1188 aa, Zea mays
  Clone ID: UC-ZMFLB73253G10_FLI.pep
ARPIPRRMAAVGVGAADERWASLCNCVVNFLLEERYHLTALELLQELQEDGRSAHALRLRAFFSDPALFPPDLVARSSSAPPGADPQILLEEKIAAEEKLALTEYDLRLAKEDLSQLKLELQKQKESSPDDSNGLLLGASIREGYTRQQENWDVKISALGPLKDNERKDLNCAVKEYLLLAGYRLAVMTFIEEVPDQDLDVWPNSSACVPDALRRYYYQYLSSTAEAAEEKISILQENETLLKDNERLNAENDSLMKSREGANSQVAALRKSLEAAHKDIKDKEKMIQDLRQSLDVQRKELNDCRAEITALKMYIEGTQSIKQLFVGTSDGVKSHSFANSVGASSLNNEDEDSKGSEAITNKLASAVNITDDTQKDRQVLESSAEGSSVSETPVSFTAVENDSYGTSKEDKSVSNISSNNVCFQSNLHGASMTGKSQGSSDGISMYLSIEKLESPSKQKSSDKIALETIKIVSDALPKIVPYVLINHREELLPLIICAIEKHPDSDVRDSLTHTLFNLIKRPDGEQRRIIMDACVELAKSVGEMRTETELLPQCWEQINHQYEERRLLVAQSCGELAVYVRPEIRDSLILSIVQQLVEDAATVVREAATHNLALLLPMFPNLDKYYKVEELMFQLVCDPSGAVVEVALKELVPAVVRWGDKLDQISRVLLAHILASAQRCPPISGVEGTIDSHLRVLGEQERWNIGVLLRMLTELLPFIHQKAIQTCPFASADPTSSTPENFSASCLKSYATGDSEWSAFEWMHTDCLPDLIKLACLLPVKEDNLRTIITKYLLEVSGLYGKDYLEHIMLPVFLVAAGDIDSGDFTYFPLSIQPKVRGLRPKTSTAEKLAIMCVFPLLLSGILGSPSSRQQLEEYLRKVLIQNTKDGSFSMHHTTEIINAVRFLCLFVEHHSVIFNILWEMVASSDTSLKINAAALLRALVPYTDVKIASTHILPALVTLGSDQNLKVKYASIDAFGAVAQHFKNDMVVDKIRIQMDAFLEDGSHEASVSVIRALAVAVPHSTDRLREYLLTKIFKMTCITPVGNDIERRRERANVLCEALRALDATDLPAMGIRDLLLPSIQNLLKDLDALDPAHKEALEIISRERSGGTLESISKVMGAHLGIASSVSSFFGENSLLTKKEGGEEHDPAGPTAPEQNLQAQPESTRFGRIMRSGFGDILRGQSKGQ

SEQ ID NO: 72982 - protein, 317 aa, Zea mays
  Clone ID: UC-ZMROB73080G04_FLI.pep
RVQFTFNLMAKNIMSMDPGEEETERLRLEYITFMKGVVSAPLNFPGTAYWKALKSRASILGVIERKMEDRLEKMSREKSSVEEDDLLGWALKQSNLSKEQILDLLLSLLFAGHETSSMALALAIFFLEGCPKAVQELREEHLLIARRQRLRGASKLSWEDYKEMVFTQCVINETLRLGNVVRFLHRKVIRDVHYNGYDIPRGWKILPVLAAVHLDSSLYEDPSRFNPWRWKLQSNNAPSSFMPYGGGPRLCAGSELAKLEMAIFLHHLVLNFRWELAEPDQAFVYPFVDFPKGLPIRVQRVADDQGHRSVLTESTRG

SEQ ID NO: 72983 - protein, 301 aa, Zea mays subsp. mexicana
  Clone ID: UC-ZMFLTEOSINTE102B12_FLI.pep
RNGIKEIQIKTRIWRNYKIPSSFFSCVELEYACLQGCIFQLPPLFAGFKRMRTLHFVEFCATENNIGELVASCPNLEELILSRLLSFADITIHSTKLKVLRVDGMFKHLNLVTPHVSSAVINLQVNTGYVKRAGSNFNLSQFIGSLLDIENISLLGHAFECAAHGIVPGKLPRSLNRLTEITLELDLGNLKEANAAHCLFQIAPNLRRMELQLMHRGYSAPTSSFWDSVDRQDCLFKNLYTVVMNNFTGSCAESGFLKLLLDDAPVLRSARIEDNNKLDKESLKRLLKMRRASKDAEIILL

SEQ ID NO: 72984 - protein, 193 aa, Zea mays subsp. mexicana
  Clone ID: UC-ZMFLTEOSINTE68E09_FLI.pep
FYEGNMASCNTARFYCLFMRGSGLRSFLIFRVVERSGHRLMLVYIAICSLMGSLTVISVKAVAIALKLSFGGSNQFIYVQTWFFIVVVTICCLVQLNYLNKALDSFNTAVVSPVYYVMFTILTIVANMIMYKDWASQTATQIATQLCGFVTIVAGTFLLHKTRDMGNPPPPPPDQMCLQEAGECAPRSMTSSS

SEQ ID NO: 72985 - protein, 471 aa, Zea mays subsp. mexicana
  Clone ID: UC-ZMFLTEOSINTE098F09_FLI.pep
SAGPPALTAASLPLRYCSSPPHSPAGAAAAAAAARSYPTSASGGGTAGGKGKMFGRAPKKSDNTKYYEILGVPKSASQDDLKKAYRKAAIKNHPDKGGDPEKFKELAQAYEVLSDPEKREIYDQYGEDALKEGMGGGGSHVDPFDIFSSFFGPSFGGGGGSSRGRRQRRGEDVVHPLKVSLEDLYNGTSKKLSLSRNVICSKCKGKGSKSGASMRCPGCQGSGMKVTIRQLGPSMIQQMQQPCNECKGTGESINEKDRCPGCKGEKVIQEKKVLEVHVEKGMQHNQKITFPGEADEAPDTVTGDIVFVLQQKDHSKFKRKGEDLFYEHTLSLTEALCGFQFVLTHLDNRQLLIKSDPGEVVKPDQFKAINDEGMPIYQRPFMKGKLYIHFTVEFPDSLAPEQCKALETVLPPRPSSKLTDMEIDECEETTMHDVNNIEEEMRRKQAHAAQEAYEEDDEMPGGAQRVQCAQQ

SEQ ID NO: 72986 - protein, 283 aa, Zea mays subsp. mexicana
  Clone ID: UC-ZMFLTEOSINTE101G02_FLI.pep
LTEQVKADGLLHTTCGTPNYVAPEVIEDGGYDGATADIWSCGVILFVLLAGYLPFEDDNIIALYKKISEAQFSCPSWFSAGAKNMITRILDPNPTTRITISQILEHPWFKKGYKPPVFDEKYQTSLDDVDAAFGDSEDRHVKEETEDQPTSMNAFELISLNQALNLENLFEAKEEYKRETRFTSQCPPKEIITKIEEAAKPLGFDVQKKKYKMRMENPKAGRKGNLNVATEVFQIAPSLHVVELKKAKGDTLEFQKFYRSLSTQLKDVVWKCDGEVDGNSAAA

SEQ ID NO: 72987 - protein, 331 aa, Zea mays subsp. mexicana
  Clone ID: UC-ZMFLTEOSINTE015H08_FLI.pep
PQLPFQQLLGQPCHIFLTHTYIHTFNFNLLGKLNWVRSSPTMASLMISLSSFVILSFFQGAAGGITFTFTNRCGGTVWPGLLANSGSSPLQTTGFELGPGETRSLTAPPGWSGRFWARTGCAFDAASGKGACATGDCGSGEVECRGRGATPPATLAEFTLGGGGKDYYDVSLVDGYNLPMVVEAAAPGCPVTGCLVDLNERCPVELRAGGQACRSACEAFGTPEYCCSGQFGNPDTCHPSPYSQMFKAACPRSYSYAYDDATSTFTCTGTDYSITFCPPRAGTSSSQKATKGPLPTPRDVQLEGDSWLASLATGETDAATSTAAASLLQAA

SEQ ID NO: 72988 - protein, 614 aa, Zea mays
  Clone ID: LIB3245-484-F8_FLI.pep
RDMADGAGSASGLVEKLAELSTGGAGQNPPPAGEGGEELQLSKNAKKREEKRKKLEEERRLKEEEKKNKAAAAASGKPQKASAADDDDMDPTQYYENRLKTLDSLKAAGVNPYPHKFPVGISVVEYIEKYKTLNNGEKLTDATECLAGRIMNKRTSSSKLFFYDLYGGGMKVQVMADARTSELDEAEFSKYHSSVKRGDIVGICGYPGKSNRGELSVFPKKFAVLSPCLHMMPRQKGEGSSVPVPWTPGMGRNIENYVLRDQETRYRQRYLDLMVNHEVRHIFKTRSKVVSFIRKFLDDREFLEVETPMMNMIAGGAAARPFITHHNELNMRLFMRIAPELYLKELVVGGLDRVYEIGKQFRNEGIDLTHNPEFTTCEFYMAYADYNDLMELTETMLSGMVKELTGGYKIKYHANGVTNSPIEIDFTPPFRRIDMIKDLEAMANLNIPKDLASDEANRYLIEACAKYDVKCPPPQTTSRLLDKLVGHFLEETCVNPTFIINHPEIMSPLAKWHRSRPGLTERFELFVNKHEVCNAYTELNDPVVQRQRFEEQLKDRQSGDDEAMALDETFCAALEYGLPPTGGWGLGIDRLTMLLTDSQNIKEVLLFPAMKPQE

SEQ ID NO: 72989 - protein, 798 aa, Zea mays
  Clone ID: LIB3245-216-B8_FLI.pep
NIKLRTETSFDPQSKQAIDLAWQSPEEVRRHVGQPLPERRVPHHVEPREQRHRLERCQEGGDRKEQARQQVHGRGAGVAPRHRAPRTLGVGRNVADHLLYPRPEAPQPVVPHADHLGTTRRREVVELLVQLVQVRHLGVRHLGVDVPRVPRPAPVVPEADEELVHEEGGHDEVGAAHQHGVDDVDRDGGGRVLPVTDVDEPPEPREQGRQRRHEAEEVGLAAAHAPPVRVRLAEVLDALPPQRRVHPAQPVRDERHRLPPQRLLVHDGQRGVVVHRRQVWLRVRLEQAQRRRAREAHGELELAHLLDAAAVEGDERVRVRVDAPGLERREPDAHLAEEDVLDGVAGHEATLVAYLAVVEDGDGEHGAVVVHVPEALLVEPRREAVDDGLRAEPLDAVLGHAVGVAGAPAVARANGAQAERVVDAELDEANGRPVVPQLPRRRPDVAQVVDRLCQHSVSALEAQPDAYLGRELVDFGGSFWPHQIKPSWANRAGVPPPFEFFEWDVDMANDLLLVDLDAVLDGEDEVVLERLGGDEHVVLVPAARGQAGDARPGLVHLRGDPGAHEDLADARLVRECDVAGLDDIDAHVPEARHGVLLAADVRGQLGVHGERGVGVHRQREALVGLRAEPHGHHHLAPALRLLVEDVVPLRRERAVGRHAERGVGQVEAQAADEVVLGEALALDHDVQERGLDPLPREREHVVPLRARRLLDVPRGAGVAPELHLRERVEAASPLEVPRLEDAHVQVLHPLHEVVPAGPPAGETGSRLPDPELIRWRQRAEGAKPRQDAGHPCSRRQLS

SEQ ID NO: 72990 - protein, 231 aa, Zea mays; identical to SEQ ID NO: 43391
  Clone ID: LIB3591-092-G5_FLI.pep

SEQ ID NO: 72991 - protein, 290 aa, Zea mays
  Clone ID: LIB3591-079-D1_FLI.pep
PTPTPMPRAGVSSSESSRRGAGAFRTLSEDRRITVFCSDGRLYQVDYAWNATKLAGVTSVGVRGTDSVCVVGQRRANTHAPKDKLLDMTSVSRLFPITDRLGLLATGIAGEGRALAHEARNQTAEFRFNWGYEMPPDVLAQWIADRAQIWTQYVSKRPSGVVAMILGIDDEKGTPQLFTCDPAGYFFGHKAASAGQRDTEAVNFLEKKMKNNPSLPFQETIQMAISALQFALKADLKASEVEVGVVRTDDPTFRVLTEAEIDEHLEAINPEPRHSEMLPGLFRDKLTLEN

SEQ ID NO: 72992 - protein, 198 aa, Zea mays
  Clone ID: LIB3591-083-E6_FLI.pep
KSLALVQVAFLVGVDDAVGLWVGDACQHITFLLLPVIKEGPIRLVNRTRLDFAGTGGASPSTARVWQLHTGSLGCVKDVGVVWSIKLVLFTFRPDKLHLVYSHGGDIQFLGGLQAWLKKLRDEGLFTAVWEACVVLTLPNSVQEVANVLVDILNPDNLAEIRGGGGEQGSWCGASPLRLGPPRSRRVAFRHSPLRRGD

SEQ ID NO: 72993 - protein, 304 aa, Zea mays
  Clone ID: LIB3591-072-A9_FLI.pep
VGSAVRLDALAAPAADADPGAVGDKLVFEAPPQPVREDYVQNAVKFLSHPKVRGSPVVYRRSFLEKKGLSTEEIDEAFRRVPDPQPSTTATTSPQQQVNSQNQSVGVQAYAPAQPVHPANAGPVVLPTQPRFSWYQAFLAAGLLLGFGASAAVFIKKLFLPRLKSWIRNVVAEGNGTEGNQLKPRIDDETADAVKASASAVSAIAKTNQQLLASKDEEKKILVTLTQALDSQAKELKSLTDSIGHTREPINITRDDRFSQYRPLEDHAPTVIRNGAINSSWRASQQTNMYGVSNGDFGSGSYLL

SEQ ID NO: 72994 - protein, 452 aa, Zea mays; identical to SEQ ID NO: 47560
  Clone ID: LIB3593-002-D6_FLI.pep

SEQ ID NO: 72995 - protein, 230 aa, Zea mays
  Clone ID: LIB3597-006-H5_FLI.pep
SLEKMGALDWNKIVHQNQGWRLISCIWLHAGLIHLVVNMLSLLFIGIRLEQQFGFVRIGAIYLLSGFGGSVLSALFLRNNYISVGASGALFGLLGSMLSELLMNWTIYSNKAAAIITLLFIIALNLAIGILPHADNFAHIGGFATGFLLGFVLLARPQFGWMEHHELPQTNQPPKYKAYQYILWVVALVLLLVGFVISLVMLFKGKNGNDGCHWCHYLNCVPTSKWKCNT

SEQ ID NO: 72996 - protein, 407 aa, Zea mays; identical to SEQ ID NO: 40601
  Clone ID: LIB3597-037-C10_FLI.pep

SEQ ID NO: 72997 - protein, 127 aa, Zea mays; identical to SEQ ID NO: 60390
  Clone ID: LIB3597-045-H3_FLI.pep

SEQ ID NO: 72998 - protein, 330 aa, Zea mays
  Clone ID: LIB3606-002-F7_FLI.pep
GAPPQPGAPLDRDPGDMPRYDDRHGNTRLYVGRLAPRTRSRDLEYLFSKYGRIREVELKRDYAFIEFSDPRDADDAQYNLDGREVDGSRIIVEFAKGVPRGSGGSREYMGRGPPPGTGRCFNCGMDGHWARDCKAGDWKNKCYRCGESGHIERNCQNSPRNLRRDKSYSRSPSPRGGRGRSRSYSRSRSYSRSRSPSGSPRGGRRERDERRSRSLSYSRSASPRRSVSPAKEKERSRTPNGSRSPRSPSPRAEVSPPLKDNGARNGSDHEGNPGGGENSKRSRSPSDGYRSPVANGRSPSPRDDRSPSPKGNNEDDERRGSPRGSQSPLN

SEQ ID NO: 72999 - protein, 212 aa, Zea mays
  Clone ID: LIB3606-012-E3_FLI.pep
GRGSVTPVRMHGEPEGGGGGGGRGRRAVGAAVGRRQLHPRQRLHHAAPRLPAGAVAQEAPPPPPRRLPARARLQGPLQRHRRGQGGDRGDGGGARGDGGGDGEPARRLHARRRPPRQELPLQQGAEPVQPSHQEPGLQGPRRPAARHGAGRLPERRAHPDRDREPAHTTAKDPVPDVHAPPWRDMEKIEAEKVILKLRGRRRNSRTGTARQA

SEQ ID NO: 73000 - protein, 376 aa, Zea mays
  Clone ID: LIB3606-026-C11_FLI.pep
TSPSLHHKSTSPQHHQAPASSQPLQHTTPHANPPRATTTTVTMAAARYDVEKGGRNNGDGKPSPPPPGHLYPQRDGEREWVPWLVPLVVAVNIVLFAVAMYVNNCPAHAASSRRGGAGSCVARGFLHRFSFQPLSENPLLGPSSATLQKLGALVWDKVVREHQGWRLVTCIWLHAGVAHLLANMISLVLIGLRLEQQFGYVRVGIIYLVSGVGGSVLSSLFIRNNISVGASGALFGLLGAMLSELFTNWTIYANKAAALVTLLVVIAINLAIGILPHVDNFAHIGGFLTGFLLGFVFLMRPHYGWMQRYALPSDVKYTTKKYLVYQWALLAVASVLAVIGFAIGLGMLFRGVNANDHCGWCHYLSCVPTSRWSCGK

SEQ ID NO: 73001 - protein, 481 aa, Zea mays
  Clone ID: LIB3606-042-A12_FLI.pep
RESPDPSSTTSPVVSGPARGRCLDCPRPVMDRAELTTEQVLKRDIPWEHYMSTKLISGTCLQLLRRYDHKPESQRAPLLEEDGPAYIRVFLNILRSISKEETVEYVLALIDEMLATNPKRAALFYDQSLSGEDIYEPFLRLLWKGNWFVQEKSCKILTVIISARPKLQNGTLPNGDASNSKSKLTSTHDVLRGLVDWLCSQLRNPTHPSCSIPTSIHCLSTLLREPYVRTLFVQADGIKLLIPLISPASTQQSIQLLYETCLCIWLLSFYDAAVDYLSTTRVMPRLVEVVKGSTKEKVVRVVVLSFRNLLAKGAFAAQMIDLGLPQMVQNLKAQAWTDEDLLDALNQLEVGLKENLKKLSSFDKYKQQVLLGHLDWSPMHKDPSFWRENINNFEENDFQILRVLMTIIDTSSDTTALAVACYDLSQFLQYHPSGRIVVADLKAKDRVMKLMNHENTEVRKNALICVQRLFLGAKYASFLQA

SEQ ID NO: 73002 - protein, 182 aa, Zea mays
  Clone ID: LIB3606-060-H12_FLI.pep
LICAVALAPSCPAACVVDRKRNSTKDSVALYAVQCYKCYKWSTVPKEEFETLRENFTKDPWFCSRRPDSSCEDDADIEYDSSRIWVLDKPNIPKPPPETERLVVMRGDYSKMDTYYVMPNGKRARCAGDVDKFLEANPEYKDRISASDFSFAPPKVVEETVSHNPAWQAAKAKKQEKAEAQK

SEQ ID NO: 73003 - protein, 431 aa, Zea mays; identical to SEQ ID NO: 56603
  Clone ID: LIB3607-008-E10_FLI.pep

SEQ ID NO: 73004 - protein, 177 aa, Zea mays; identical to SEQ ID NO: 46400
  Clone ID: LIB3607-010-A1_FLI.pep

SEQ ID NO: 73005 - protein, 359 aa, Zea mays
  Clone ID: LIB3607-015-B8_FLI.pep
KLRAKMSWRRNQLRAFLVLAVILLITAATYRANAQPAPPADPTPAADTCADPSVEGACRNVPKALRLKLIAIPTILVSSVIGVCLPLLSRSVPALRPDRNLFVIVKAFASGVILATGYMHVLPDSFSNLTSPCLPRKPFYNRRKGGNTSGRRTSGAVADHESPAHEHHWHSHGHGHGHGHAGGIVVADKPEDDEASQVQLRRNRVVVQVLEMGIVVHSVVIGLGMGASQNVCTIRPLVTAMCFHQLFEGMGLGGCILQAEYGAKMKAGLVFFFSTTTPFGIALGLALTKVYRENSPTALIVVGLLNAASAGLLHYMALVELLAADFMGPKLQSSVRLQLLCFLAVLLGAGGMSIMAKWA

SEQ ID NO: 73006 - protein, 203 aa, Zea mays
  Clone ID: LIB3607-016-E1_FLI.pep
PLHCWMKHGPLSRGAPSLVIIFILLTTLFIILVIDLRLGLVRLLFIFLLFLLGRSLLSCSALALVVGSDGLVVLELELVSLGYIGSLVRLAQGFPPVASSFPHRSDRLVLRVLLLELLAKFLHEHEESAGSPLRLVGVLAGLPFPALGGLLRPLALHRQLGIGLGGALGFGPLHGGFERRHGAQRSDPRLAEGIPVAGGRIGV

SEQ ID NO: 73007 - protein, 229 aa, Zea mays
  Clone ID: LIB3607-020-H3_FLI.pep
HPQSSSSRSPPQAFHDVRAIQVHRVLDCFDGIFGWEEIIHCNFFVFILFIIFKKAADLLKAMRGEVRDVLVVTEFRVISTDSYDLIIFLTLIDHRHEPNSTSSQKTPRDNLFLHQYEDVHGVAILTECAWNETIVMWVNNRGVKDTIHLDQTRYLVQLILNLAASRNLNHTIEHFRSLWSYLQIMPWVNSNIFLGHGRKDTLIESSSSSHDGADRMVPLLALATGPGKG

SEQ ID NO: 73008 - protein, 299 aa, Zea mays
  Clone ID: LIB3607-039-E4_FLI.pep
KTRSERQKTTINKARNESDPDLIRPNPSINPHAGRVMLRPFLSPPLTALPPPPASTAAAAGAAAMRPASSSSSRSSAGGGGAHHHQHNHGGHSISVSPPTCRHAPSSATLDLLILLLVLFSLAFLLASSLSHVARSLSPLLATPPAAAALAYATAALPYLAAAAVLVATAFLSCRRLPRRRCRNPRCRGLRKALEFDVQLQTEGALRAGAGSTAGGAEASMWREIEALPWKGGQGGNNPDYECLRAELRRMAPPNGRAVLLFRNRCGCPVAKLEGWGAPKSKRRNKKGTQGSFHDRGLR

SEQ ID NO: 73009 - protein, 153 aa, Zea mays
  Clone ID: LIB3607-014-F12_FLI.pep
CWPLNFLWVNSSESANNFDYAAYYRGAMGILLVYDVTDESSFNNIRNWIRNIEQHASDNVNKILVGNKADMDESKRAVPTSRGQALADEYGIKFFETSAKTNLNVEQVFFSIARDIKQRLAESDSKPEDRTISINRPEGGEASASQKSACCGS

SEQ ID NO: 73010 - protein, 623 aa, Zea mays
  Clone ID: 700151401_FLI.pep
LSGFSRRVMALSASRVQQAEELLQRPAERQLMRSQLAAAARSINWSYALFWSISDTQPGVLTWTDGFYNGEVKTRKISNSVELTSDHLVMQRSDQLRELYEALLSGEGDRRAAPARPAGSLSPEDLGDTEWYYVVSMTYAFRPGQGLPGRSFASDEHVWLCNAHLAGSKAFPRALLAKSASIQSILCIPVMGGVLELGTTDTVPEAPDLVSRATAAFWEPQCPTYSEEPSSSPSGRANETGEAAADDGTFAFEELDHNNGMDIEAMTAAGGHGQEEELRLREAEALSDDASLEHITKEIEEFYSLCDEMDLQALPLPLEDGWTVDASNFEVPCSSPQPAPPPVDRATANVAADASRAPVYGSRATSFMAWTRSSQQSSCSDDAAPAAVVPAIEEPQRLLKKVVAGGGAWESCGGATGAAQEMSGTGTKNHVMSERKRREKLNEMFLVLKSLLPSIHRVNKASILAETIAYLKELQRRVQELESSREPASRPSETTTRLITRPSRGNNESVRKEVCAGSKRKSPELGRDDVERPPVLIMDAGTSNVTVTVSDKDVLLEVQCRWEELLMTRVFDAIKSLHLDVLSVQASAPDGFMGLKIRAQFAGSGAVVPWMISEALRKAIGKR

SEQ ID NO: 73011 - protein, 410 aa, Zea mays
  Clone ID: LIB3608-007-E10_FLI.pep
KGTPLHPMHCRPCPSQLSPPLAPIIPALPFPEPALPMACSGLRLALLAAVLALLLLLLPSALASEPLNPEVQALIAIRQGLVDPHGVLRSWDQDSVDPCSWAMITCSPQNLVIGLGVPSQGLSGTLSGRIANLTHLEQVLLQNNNITGRLPPELGALPRLQTLDLSNNRFSGRVPNTLGRITTLRYLRLNNNSLSGPFPASLAKIPQLSFLDLSFNNLTGPVPLFPTRTFNVVGNPMICGSNAGAGECAAALPPVTVPFPLESTPGGSSEHSSFLPLCLSFISTASQAGQLARLVALNAFRPFLGVRGVACMHASLLPLLLCPCLAGVAVEGTRTHGAVGMGAPSLAAGNTCSRLYVALVARSGLNRASAAALAWGSAFGFCVCARAQGQGQGRRQRAGQRLLARGCRSA

SEQ ID NO: 73012 - protein, 293 aa, Zea mays
  Clone ID: LIB3608-009-E12_FLI.pep
HTSSSHMDDEWRPVMAMLVFNLISAVMTALVKKALQQGLNALVLITLRQLVATLFLAPIAYFKERNTRPKLTLEIFVYHFFSAALGASLSQYSFFYGLKLTTATFAITFANMAPVLTFLIAIALRVCKDGGDAHVARWSAAAEPLQGHGRDTPQQRHSSALSSTTRQRRRQEGLDAGDCSVTGQLPRLLPVVAAAKQADEQVPGALLQHRLHVLHQHAADRIADGDGRVAPRVGVDCHKEAGDGHDIVFGNHGVCSRLPDNDLVRPQEGSSFHCSLHPHRPDHGGHHRFLLPP

SEQ ID NO: 73013 - protein, 344 aa, Zea mays
  Clone ID: LIB3632-031-C8_FLI.pep
AMAPPLLSPPLLADALATLPRSFLCSRPTRQLPTVGLAGAVRGDRGRWSVRRRDPRVFAASTEADRERSDEDVADDYYSVLGVMPDATPEEIKKAYYSCMKECHPDLSGDHPDVTNFCMFINEVYSVLSDPAQRAVYDEIHGYTATAINPFFDDSAPKDHVFVDEFTCIGCKNCANICPGVFQIEEDFGRSRVYSQSGSTELIQDAIDSCPVDCIHWTSAAQLSLLENEMRRVERVNVGLMLAGMGASINVFRMASVRWEKRQAKVLEKARTRMVKQETSDTRSSWSEVWASSPPRDDQSNGDGEASERAKRAAAAARRWREFSRRGADRPPTHKLPEAVGNKD

SEQ ID NO: 73014 - protein, 199 aa, Zea mays
  Clone ID: LIB3632-033-B7_FLI.pep
TPTPASPPQSTSSSGLQLRLSSSESSVRVVRPSSRRSSYVLRTRASAWYDRFSTHGDEEGRRRGGAEADPEAVLEPGASSAARRGVRGGGGRGGGDGAAVRRAARPLRGVRGRAAPPLRGAHRAAGPPRVPLPAAPRRGGVRVRRRRHPRPPLRGGRLPLPHLRACLRPVKGCGLPATPRRRRYIRSIHWYLGELTHLH

SEQ ID NO: 73015 - protein, 561 aa, Zea mays
  Clone ID: LIB3632-046-B7_FLI.pep
RYSTAFCSEMALATNVAAAAAAAISGGSASQPRRASPSLLLLRRRCAVGAVHAAEPSKNTGVVPAAAKASTPTVVPENDTVPAPSLAPDASSRARWAVDSWRTKKALQQPEYPNQTELEEAVNTIEKSPPIVFAGEARHLEERLADAAVGRAFLLQGGDCAESFKEFTSANIRDTFRVILQMAVVLTFGGQMPVVKVGRMAGQFAKPRSDAFEERGGVKLPSYRGDIINGEAFDEKSRVPDPQRMLKAYYQSASKLNLLRAFATGGYADIQRVTQWNLDFTEHSEQGDRYRELAHRVDESLGFMGAAGLTVDQPLTTMIEFWTSHECLLLPYEQALTRQDSTTGLFYDCSAHMLWVGERTRQLDGAHVEFLRGIANPLGIKVSDKMEPGELVKLIDILNPTNKPGRITVITRMGAENIRVKLPHLIRAVRQAGQSVTWITDPMHGNTIKTPCGRKTRPFDSILAEVRAFFDVHDQEGSQPGGVHLEMTGQNVTECTGGSSNVTFDNLRDRYHTQCDPRLNASQSLELAFILAEKLRKRRMRRSSVASGLGRSILPLPPFGF

SEQ ID NO: 73016 - protein, 383 aa, Zea mays; identical to SEQ ID NO: 64314
  Clone ID: LIB3632-010-F1_FLI.pep

SEQ ID NO: 73017 - protein, 829 aa, Zea mays
  Clone ID: LIB3632-031-G12_FLI.pep
APAAPAGLASVAVAVAVAVLAAAASAAVTYDRKAVVVNGQRRILMSGSIHYPRSVPEMWPDLIQKAKDGGLDVVQTYVFWNGHEPSRRQYYFEGRYDLVHFIKLVKQAGLYVHLRIGPYVCAEWNFGGFPVWLKYVPGISFRTDNEPFKAEMQNFTTKIVDMMKSEGLFEWQGGPIILSQIENEFGPLEWDQGEPAKAYASWAANMAVALNTSVPWVMCKEDDAPDPIINTCNGFYCDWFSPNKPHKPTMWTEAWTSWYTGFGIPVPHRPVEDLAYGVAKFIQKGGSFVNYYMYHGGTNFGRTAGGPFIATSYDYDAPIDEYGLLREPKWGHLKELHKAIKLCEPALVAGDPIVTSLGNAQQASVFRSSTDACVAFLENKDKVSYARVSFNGMHYDLPPWSISILPDCKTTVYNTASVGSQISQMKMEWAGGFTWQSYNEDINSLGDESFATVGLLEQINVTRDNTDYLWYTTYVDIAQDEQFLSNGKNPMLTVMSAGHALHIFVNGQLTGTVYGSVEDPKLTYSGNVKLWSGSNTISCLSIAVGLPNVGEHFETWNAGILGPVTLDGLNEGRRDLTWQKWTYKVGLKGEALSLHSLSGSSSVEWGEPVQKQPLSWYKAFFNAPDGDEPLALDMSSMGKGQIWINGQGIGRYWPGYKASGTCGICDYRGEYDEKKCQTNCGDSSQRWYHVPRSWLNPTGNLLVIFEEWGGDPTGISMVKRIAGSICADVSEWQPSMANWRTKGYEKAKVHLQCDHGRKMTHIKFASFGTPQGSCGSYSEGGCHAHKSYDIFWKSCIGQERCGVSVVPDAFGGDPCPGTMKRAVVEAICG

SEQ ID NO: 73018 - protein, 594 aa, Zea mays
  Clone ID: LIB3689-262-B5_FLI.pep
RKTFELARSVKPRLSLGWELPRPEIFFSPSLAHPSRRPPSMEIAKNSIAISRVRDLPPSKRFRHIGSHLGSTPSVPLPAKKRMLPSHTPEEAAVALCLPVKKRVIAAPRVEVAGATFCLPAKKRAIVPSPPEDAAPACLPAKKRACAAPADAAVPACVPAQERPCAPLPPPPVVVSWARVSTKKRVHAPAPRGHAAGSVPARRPANGLSCAEPLVDTVASASVWAKKRAHSPTRREDAARSTPVCLPVNKRVMPPFVPPPSVQSDGAWLGAAKEARPQGSSKHGDGGGGAVSSRVASCAEERARGKEFKRPEKPVNHKGTKEQVPMEPRCPPREGKRLEKSCEIVDGEQSEAVVEALRKSDGASDAKGAPLKEEPRNGADEVAAQEPVDVEDDDDDDGVRCAVCASTDGDPSDPIVFCDGCDLMVHASCYGNPLARAIPDGDWFCSPCVAGRGKPAAARRRSCCLCPAGGGAMKRTTEGKWAHISCALLVPEVFFRDPDGRDGIDCSRVPAHRFARGCYVCGGNNNGCALECSQPKCGLGFHVSCGLGAGLCIEYQEGKGGGGAIVAGFCREHTELWEKQQLTGKYKIVARGQE

SEQ ID NO: 73019 - protein, 587 aa, Zea mays
  Clone ID: LIB3732-006-E3_FLI.pep
PQHHTATAPLGLPLQLLAGDERAVQPVRDAARQLDGGLGPHVAGVDDEHFRRAAGLVVHVAQHVAVVLRGARGGVGARHEAGLAAVPAVAVDELVDGAGLEVHLGEARHLGPRLGDGEVGVARPPAQQLPVHHAGLQVHLVGVAQDRAPRGRAGARVQPDLRQHAAEALLAGGGLVEHGVRGGHAGPDHHDLARGLVLPRVPEVEAEAVGDVHPPQPRRVGGALRQHPKPRGLVPVVHHGGAAQDHLLELEHDLLVRDDGVVLGDGEVVHHGGRVHGDLDVGGLAAVGGEVEVLEERLGHDIVAEREELAGGRVKLGVRDHGGVELAAEVVAPGGLEVPVGGDAHVVGEVVLRHGEEAVVVVHQAGVGDPDPLGRVEHAAEGAGAEEEQARHARVAVELADGLGEHGPADGALLPEPRRLREPARVRLGAAPAEPHGVQHAVAVEEVVPRARRVERVGAVADVHAVEARRDAAGHGQLAGGRALPDGRVVAGDLDGRVGGPWQRVRALEDARHEPLLQRVERRRGEPLERVPLGSGGAHWPRGDRGPGLAGAGVELGRLLGSARSRRGGRSRRWSWSGDGGRHCSGN

SEQ ID NO: 73020 - protein, 169 aa, Zea mays
  Clone ID: LIB3960-020-D3_FLI.pep
AHDFWRREKLVDLLDIDLQWRMHKVSDGQRRRVQICMGLLHPYKVLLLDEITVDLDVVTRMDLLGFFKEECEQREATIVYATHIFDGLETWATDFAYIQEGELRRSGRYSDIEELRSAKNLLSVVESWLRSETKLPKKEPPPRPETQARRSSPFDASPFRSSRHMAYYR

SEQ ID NO: 73021 - protein, 640 aa, Zea mays
  Clone ID: LIB3960-002-B7_FLI.pep
FRIHPSTFGIGSVGMARRLISPAAACRGCGLVRTGFLPAISSFHYRALPSCSPKRTSSVKNCFSNTYNIRKEGSRWIQSGPPLLLNRVKFVGKRTSCSVATEPPPAATEEPGMDVPKEIFLKDYKAPDYYFDTVDLQFQLGEEKTIVTSKIVVSPGVEGISAPLVLHGHDLKLISIKVNGTELKGEEYKVNSRHLMLSTPPAVVFNLEIVTEIYPQLNTSLEGLYKSTGNFCTQCEAEGFRKITYFQDRPDVMAKYTCRIEADKTLYPVLLSNGNLIEQGDLEGGKHYALWEDPFKKPSYLFALVAGQLGCREDSFVTCSGRNVTLRIWTPAQDLPKTAHAMYSLKAAMKWDEEVFGLEYDLDLFNIVVVPDFNMGAMENKSLNIFQSRLVLASPETATDGDYAAILGVVGHEYFHNWTGNRVTCRDWFQLTLKEGLTVFRDQEFSSDLGCRTVKRIADVSKLRIYQFPQDAGPMAHPIRPHSYIKMDNFYTVTVYEKGAEVVRMYKTMFGASGFRKGMDLYFKRHDGQAVTCEDFYAAMCDANNAQLPNFLQWYSQAGTPIVKVASSYDPSSQTFSLKLSQEVPPTPGQPVKEPMFIPVAVGLVDSTGKDMPLTSVYSDGSLQTVSTDGQPVFTTVLQF

SEQ ID NO: 73022 - protein, 447 aa, Zea mays
  Clone ID: LIB3960-010-C5_FLI.pep
ATALAAVAASSPRQSSHADGGPGHLGGADGAFAFPPPLPFERLPRRHPRWPATMMAAAALRPHKSSPARVPTRCVAALCAACFLVGVGVVNRYWPVPEPHPGCPDKAGPDHSRAVLNQASQTREVVMALDKTISDIEMRLAAARAAQAMSQGMSPGDSDSEGDQGTARRRMSFVMGVFTTLANRKRRDSIRQTWMPQGDQLRRLEDKGVVIRFVVGRSANPNLENEVDHAIDMEDEEYGDILRINHVEGYGGLPMKVQMFLSTALTMWDADFYVKADDNVHVNIGITRSILARHRMKPRVYIGCMKSGPVVAKNDSKYYEPDHWKFGTEGNNYFRHATRQLYAVTRDLATYISANRHILHKYSNEDVSFGSWLIGLEVEHVDERSLCCGTPPDCEWKGQAGNPCAASFDWNCTGICNPVERMTEVHRRCWEGLGAEGHAQSLTFDSQ

SEQ ID NO: 73023 - protein, 197 aa, Zea mays
  Clone ID: LIB4073-017-G2_FLI.pep
VTYNPTFTRGENAIETGRFISRMNRGAGIRPVPTDLEINSCRCACQAMTGTAAIYNRMMIHLAATGEMFTHCSCNCISPLSTFLSRRIMSCTNLPFLQHTWLSSARQFLVLGLTDLMMAPFLISSGFMFTASINGATSISASPIGSSLLNVSLSNTSSLSGWLGSVTVRVSSSCQMGLTDLFFTLVFSFFLPSRKTT

SEQ ID NO: 73024 - protein, 374 aa, Zea mays
  Clone ID: LIB4171-016-D9_FLI.pep
LQCKPDRTSFSSMDYLDAPRFPYRGLLIDTSRHYLPVPVIKGVIDSMTFSKLNVLHWHIVDEQSFPLEISSYPKLWNGAYSYSERYTVDDALDIVQYAEKRGVNVLAEIDVPGHALSWGVGYPSLWPSATCKEPLDVSNEFTFQLINGILSDFSKIFKFKFVHLGGDEVNTSCWSTTPHIKSWLMQHSMNESDAYRYFVLRAQKIAISHGYDIINWEETFNNFGDKLDRKTVVHNWLGSGVAEKVVAAGLRCIVSNQDKWYLDHLDATWEGFYTNEPLTNIYNPEQQKLVLGGEVCMWGEHIDASDIQQTIWPRAAAAAERLWTPIEKLAKDTRSVTARLARFRCLLNQRGVAAAPLAGYGRSAPSEPGSCLRQ

SEQ ID NO: 73025 - protein, 344 aa, Zea mays; identical to SEQ ID NO: 59183
  Clone ID: LIB4172-027-A9_FLI.pep

SEQ ID NO: 73026 - protein, 452 aa, Zea mays; identical to SEQ ID NO: 52903
  Clone ID: LIB4172-046-A3_FLI.pep

SEQ ID NO: 73027 - protein, 449 aa, Zea mays; identical to SEQ ID NO: 62758
  Clone ID: LIB4172-053-H11_FLI.pep

SEQ ID NO: 73028 - protein, 515 aa, Zea mays
  Clone ID: 700258557_FLI.pep
SGYLATSLFYFHFAFNLFSSIASSAVAVSIAVCCSVFLVLLLLTMDAGTYSISSEKSHTAAAARPPLQEAGTRPYMPSLSTGSRNPSAKCYGDRFIPDRSAMDMDMAHYLLTKPRRDKENAVAASPSKEAYRRLLAEKLLNNRTRILAFRNKPPVSENVSAAIAASSHHAKLVKQCRHIPQSAERILDAPELVDDYYLNLLDWGSNNVLSIALGDTVYLWDASSGSTSELVTIHEDSGPITSVNWAPDGHHIAIGLNSSDIQLWDTSSNRLLRTFRGVHEERVGSLAWNNNILTTGSMDGKIVNNDVRIRNHVVQTYEGHSQEVCGLKWSGSGQQLASGGNDNLLHIWDVSMASPMSTAGRNQWLHRLEDHMSAVKALAWCPFQSNLLATGGGGSDRCIKFWNTHTGACLNSVNTGSQVCALLWNKNERELLSSHGFTQNQLTLWKYPSMVKMAELSGHTSRVLFMAQSPDGCTVASAAADETLRFWNVFGDPEVAKPAAKASHTGMFNSFNHIR

SEQ ID NO: 73029 - protein, 205 aa, Zea mays; identical to SEQ ID NO: 47876
  Clone ID: 700621536_FLI.pep

SEQ ID NO: 73030 - protein, 405 aa, Zea mays
  Clone ID: LIB4721-006-G10_FLI.pep
RPPPSPPPVPKANSFQVAMPDQANQPTVLHKLGGQFHLRSIISEGVRARNICPSVSSYERRFATRNYMTQSLLGPSMSVSGGINVPVMRTPLCANAPAEKGGKNFMIDFMMGGVSAAVSKTAAAPIERVKLLIQNQGEMIKSGRLSEPYKGIVDCFKRTIKDEGFSSLWRGNTANVIRYFPTQALNFAFKDYFKRLFNFKKDRDGYWKWFAGNLASGGAAGASSLFFVYSLDYARTRLANDAKAAKGGGERQFNGLVDVYRKTLKSDGIAGLYRGFNISCVGIIVYRGLYFGLYDSIKPVVLTGNLQDNFFASFALGWLITNGAGLASYPIDTVRRRMMMTSGEAVKYKSSLDAFQQILKKEGPKSLFKGAGANILRAIAGAGVLSGYDQLQILFFGKKYGSGGA

SEQ ID NO: 73031 - protein, 172 aa, Zea mays; identical to SEQ ID NO: 36903
  Clone ID: LIB4740-002-F6_FLI.pep

SEQ ID NO: 73032 - protein, 301 aa, Zea mays
  Clone ID: LIB4740-002-F4_FLI.pep
KSLPSLHDSAPTRETLPSPSASTTRPTSRRGREREREEEAFAAAVSVGRGARMFGYQKGLDVEAGTSGAAATGGARQLYPGMQESPELRWALIRKIYVILSLQLLLTAVVAAVVVKVRAIPHFFTTTSAGLGLYIFLIILPFIVLCPLYFYHEKHPVNLILLGLFTVAISFAVGMTCAFTSGKVILESAILTTVVVLSLTAYTFWAVNRGKDFSFLGPFLFAAIIVLLVFALIQILFPLGKLSQMIYGGLASLIFSGYIVYDTNNIIRRYTYDQYVWAAVSLYLDVINLFLSLMTLFRAAD

SEQ ID NO: 73033 - protein, 305 aa, Zea mays; identical to SEQ ID NO: 40578
  Clone ID: LIB4740-001-D10_FLI.pep

SEQ ID NO: 73034 - protein, 219 aa, Zea mays
  Clone ID: LIB4740-001-A6_FLI.pep
TALPLQPQISPSLRDEAHPSMGAKAAHRRGVLDLEAQFAFFRSQHRHPVNAAAHVLLTWPTLFTNLLILHFLPLPLPVSPALALALAYAAAYLAVDRRAGAVAGLLFLAAWAASRALAARLGFALSWKLVLVTQLFCWTWQFLGHGLFEKKGPSVSDLPEVFLMEPFLIFLQVTTGTADKHILNKLFGYEPYPGFCKNVDRKIEADLRASESSSRGKTT

SEQ ID NO: 73035 - protein, 539 aa, Zea mays
  Clone ID: LIB4741-045-G6_FLI.pep
GRPGHRHTNTSRRRQRASLLSHASRQGRERDRRSPSRRRWCGCPPSSSEICLVTDLSDKMVKICCIGAGYVGGPTMAVIALKCPDIEVVVVDISKPRIEAWNSDTLPIYEPGLDDVVKQCRGRNLFFSTDVEKHVAEADIIFVSVNTPTKTRGLGAGKAADLTYWESAARMIADVSKSDKIVVEKSTVPVKTAEAIEKILTHNSKGINYQILSNPEFLAEGTAIEDLFKPDRVLIGGRETPEGRKAVQALKDVYAHWVPEDRILTTNLWSAELSKLAANAFLAQRISSVNAISALCEATGANVTEVAYAVGKDTRIGPKFLNASVGFGGSCFQKDILNLVYICECNGLPEVANYWKQVIKINDYQKSRFVNRVVSSMFNTVAGKKIAVLGFAFKKDTGDTRETPAIDVCKGLLGDKAQISIYDPQVTEDQIQRDLAMNKFDWDHPMHLQPTSPTAVKQVSCVWDAYEATKGAHGLCILTEWDEFKTLDYQKIFDNMQKPAFVFDGRNIVDSEKLREIGFIVYSIGKPLDAWLKDMPAVA

SEQ ID NO: 73036 - protein, 571 aa, Zea mays; identical to SEQ ID NO: 72958
  Clone ID: LIB4741-006-B8_FLI.pep

SEQ ID NO: 73037 - protein, 438 aa, Zea mays
  Clone ID: LIB4742-008-G2_FLI.pep
PASQHNHGVVWSSYARKARATARFTRESKATTKRCAGIIHLQKLARRPWWVVSLEEELMAASSCIACNNGSTDEKEEKRKCDLVGYEALPEWLKDNEFIHGYYRCEWPMKETVLSIFSIHNETLNVWSHLLGFLLFLCLAIFTAMVIPRNGSSRSSNSAAYQLGDLVEMANMTVALRHEALAACFLLPPSAAALSEDGQQQIPTSCPPNTSSSHHHAIQIQSSTGTAATVDAGTAADPITRWPLFAYLVGAMVCLLTSSVCHLILCHSERTAYVTLRLDYAGIAALIVTSFYPLAYYSFLCNPALQRLYMGSITALGAAAVTASLVPAFQAPELRPLRAALFSCMGASGAVPIAHKLLLYGGTAPGAVASAGYEALMGVLYGLGVAVYAARVPERWAPGRFDLVGHSHQLFHLFVIAGAYAHYHAGVEYLKWRDVDKC

SEQ ID NO: 73038 - protein, 232 aa, Zea mays
  Clone ID: LIB4742-069-B9_FLI.pep
RVTAVYNLPDTNRREPPLDLVELVCLHHRISLGNGVPGSSPVVELAVVLVGVAVERAVQVPTPAVESREPNPLPAGAAPVRPYLPPFGDRRHPLAGSGNISGLLHVHCLQLDLGNSYYRVAASNNRLHDGVAAVHDAVDRGGSQLGLILLRYHLLVALRAHVHGRRAAEEATVIDAEDGSLGGLAPSLLVLHGFLNSDETALFAIPLRRSPRGRRGGEGRGIAGNSVGFEMG

SEQ ID NO: 73039 - protein, 231 aa, Zea mays
  Clone ID: LIB4742-040-D8_FLI.pep
PLHCWMKHGPLSRGAPSLVIIFILLTTLFIILVIDLRLGLVRLLFIFLLFLLGRSLLSCSALALVVGSDGLVVLELELVSLGYIGSLVRLAQGFPPVASSFPHRSDRLVLRVLLLELLAKFLHEHEESAGSPLRLVGVLAGLPFPALGGLLRPLALHRQLGIGLGGALGFGPLHGGFERRHGAQRSDPRLAEGIPVAGGRIGVESRAKLPLAARGEREGGKGKGRRRALVK

SEQ ID NO: 73040 - protein, 269 aa, Zea mays
  Clone ID: LIB4742-070-D12_FLI.pep
PSFLAEEAVRLAFNLTTYPIDLYINTNGLASRKPRPNRRRNMSSSPVKIIGHSVSPFSHRVEAALRLKGVPYELIQEDLSNKSELLLAKNPVHKKVPVLLHGDRAICESLVIVEYVDETFDGPSLLPADPHDRATARFWADFMDSKLLKPFWLAHWTEGDAQKAQAEDAKQKLALLEAQLDGRRFFGGDTIGYVDIAACVLAPWLSVVEEVTGVAVVDEGEFPALRRWSREYSSCEALKQCVPDRDQLVAFYTERKEAYKVFANAWLQQ

SEQ ID NO: 73041 - protein, 304 aa, Zea mays
  Clone ID: LIB4742-070-H1_FLI.pep
LTHHHRNTNQQQAEQRLAARGASKSATMATALSFKALALAALLSVVVVTSGARAEQQLKRNATTASQDRSLLSYSSGWLPAKATWYGAPTGAGPVDNGGACGFKGTNQYPFSSMTSCGNEPIFKDGKGCGSCYQIRCLKSNHPACSGVAQTVIITDMNYYPVAKYHFDLSGTAFGSMASWGLNDKLRHAGIIDMQFRQVPCNFQGLTITFRVQHGSNPMYLAVLIEHENKDGDVVQADIMQSNSGHWEPMHESWGSIWRIDPNRPLRGPFSMRITNESGRQLVAKNVIPANYIPDVDYRSFVQY

SEQ ID NO: 73042 - protein, 289 aa, Zea mays; identical to SEQ ID NO: 66657
  Clone ID: LIB4742-072-C11_FLI.pep

SEQ ID NO: 73043 - protein, 281 aa, Zea mays
  Clone ID: LIB4742-072-C4_FLI.pep
VKTVKVSNLSLNALKREITEFFSFSGDIEYVEMQSESEWSQLAYVTFKDSQGADTAVLLSGATIVDRAVIITPAENYQLPPEAHKQLSGANVSTESAVRKAEDVVSSMLAKGFVLSKDALNLARSFDERHNILSNATATVASLDRQYGLSEKISLGRAIVGSKVKEVDERYQVSELTKSALAAAEQKASVAGSAILSNQYVSAGASWLTSAFDMVTKAAGDMTSMAKDKVERAEEERKAIMWEERSGLVSEYAKIHLDEPSSWEPAVLPLESVDEQKLQAV

SEQ ID NO: 73044 - protein, 323 aa, Zea mays
  Clone ID: LIB4742-072-E2_FLI.pep
VEMANIPHSFAGASPPSPSPMAGSSSGPAPGQAAKDKKMASAEQLVLELCDPELRENALLELSKKREIFQDLAPLLWHSFGTIAALLQEIISIYPSLSPPTLSPGASNRVCNALALLQCVASHPETRILFLNAHIPLYLYPFLNTTSKTRPFEYLRLTSLGVIGALVKVDDTEVISFLLQTEIIPLCLRTMEMGSELSKTVATFIVQKILLDDVGLRYICATAERFFAVGSVLANMVVSLADQPSTRLLKHIIRCYLRLSDNPRACAALQSCLPDMLKDGTFNNCLRDDPATRRWLQQLLHNVTGGGVGGAPQPGMDPMNMGM

SEQ ID NO: 73045 - protein, 289 aa, Zea mays
  Clone ID: LIB4742-073-B10_FLI.pep
GQSRANKTICRCPEPRPPPLCLASPHLTSPRRLGFCTAVDLAVPAMDVSHAGSSVAGEAPTTGEHRMGTTIVGVCYEGGVVLGADSRTSTGMYVANRASDKITQLTDNVYVCRSGSAADTQVISDYVRYFLHQHTIQLGQPATVKVAANLIRLLAYQNKNMLQAGMIVGGWDKYEGGQIFSVPLGGTILKQPFAIGGSGSSYLYALLDHEWKEGMSQEEAEKFVVKVVSLAMARDGASGGVVRTVTINADGVKRNFYPGDKLPLWHDELEPQNSLLDILAAGNPDPMVQ

SEQ ID NO: 73046 - protein, 297 aa, Zea mays
  Clone ID: LIB4742-073-F7_FLI.pep
SGARMPRATEAASQFTPGPGRPVAMNSRSSSGGVRSESSLSLGERLCAVFFPVIAIAEAVFFAFTDCLADLCTDSGSSHSRRFGAGASSSAARNSRSNHCQHHHRPFLRRAAAGGWTSPNLRQLARLADESRCFSVNEVEALFELYKKISCSIIDDGLIHKVFYLFDEKKNGVIEFDEFIHSLSVFHPLAPIEDKIDFAFRLYDLRQTGFIEREEVKQMVIAILMESDLKLSDDLLEAIIDKTFEDADADKDGKINKEEWKEFALRHPNLLKNMTLPYLRDITTVFPSFVFNTAVED

SEQ ID NO: 73047 - protein, 257 aa, Zea mays
  Clone ID: LIB4742-076-G11_FLI.pep
DAPPTRIVFRSVESDGRSLLQRALAVRRVGSAGGRRNLSWVSEMAAPPARARADYDYLIKLLLIGDSGVGESCLLLRFSDGSFTTSFITTIGIDFKIRTVELDGKRIKLQIWDTAGQERFRTITTAYYRGAMGILLVYDVTDESSFNNIRNWIRNIEQHASDNVNKILVGNKADMDESKRAVPTSKGQALADEYGIKFFETSAKTNLNVEQVFFSIARDIKQRLSESDSKPEDRTISINRPDGGEASASQKSACCGS

SEQ ID NO: 73048 - protein, 181 aa, Zea mays
  Clone ID: LIB4742-076-G12_FLI.pep
PQAFMFLSRCLRWRLGPLAADPPCQLNVLWHDGHTLSMDGAQVGVLKQANKVCLSSLLEGKHRMALETQISFEVLCNFPDEPLEGQLPDQQLSALLILADLTEGNSSRAVAVRLLHSTSGGGRLTGSLGGKLLPGSLPSRGLASSLLGTSHLSRFFGLSARFESGGRRARNGRPEKYGRPR

SEQ ID NO: 73049 - protein, 235 aa, Zea mays
  Clone ID: LIB4742-077-E9_FLI.pep
RVTAVYNLPDTNRREPPLDLVELVCLHHRISLGNGVPGSSPVVELAVVLVGVAVERAVQVPTPAVESREPNPLPAGAAPVRPYLPPFGDRRHPLAGSGNISGLLHVHCLQLDLGNSYYRVAASNNRLHDGVAAVHDAVDRGGSQLGLILLRYHLLVALRAHVHGRRAAEEATVIDAEDGSLGGLAPSLLVLHGFLNSDETALFAIPLRRSPRGRRGGEGRGIAGNSVGFEMGRPR

SEQ ID NO: 73050 - protein, 244 aa, Zea mays
  Clone ID: LIB4742-077-G3_FLI.pep
ATCVESWAQRIPRQTNRVEGEERRGWVWNTMAPMKLYGAVLSWNVTRCATALEEAGSDYEIVPINFATAEHKSPEHLVRNPFGQVPALQDGDLYLFESRAICKYAARKNKPELLREGNLEEAAMVDVWIEVEANQYTAALNPILFQVLISPMLGGTTDQKVVDENLEKLKKVLEVYEARLTKCKYLAGDFLSLADLNHVSVTLCLFATPYASVLDAYPHVKAWWSGLMERPSVQKVAALMKPSA

SEQ ID NO: 73051 - protein, 417 aa, Zea mays; identical to SEQ ID NO: 72612
  Clone ID: LIB4742-072-H1_FLI.pep

SEQ ID NO: 73052 - protein, 289 aa, Zea mays
  Clone ID: LIB4742-079-C2_FLI.pep
SRPAGLLCFLSVVLFQGEQPPSLSPVYLFLEPGEEEGAGNGGRGCCDSSGLKFGFRQVDKHQLVKMAAGFQIGVIGSLALSVASSVSIVLCNKALISTLGFPFATTLTSWHLMVTFCTLHVAQRLRFFEPKAIDGQTVILFGLLNGTSIGLLNLSLGFNSIGFYQMTKLAIIPFTVLLETIFLKKRFSESIKLSLLVLLLGVGIASVTDLKLNLLGSILSGLAIATTCVGQILTNTIQKRLKVSSTQLLYQSAPYQAAILFASGPFVDQLLTNRSVFAHKYSATVLVWS

SEQ ID NO: 73053 - protein, 424 aa, Zea mays
  Clone ID: LIB4742-081-A7_FLI.pep
TRGWPAIPREPLPLSSPSDPAPRGSARQSMASTQAEAEAGAPAPPEAAEAKEKGKQGGVLGRVWRALFGGREDFEKRLQYLSKEEAAVHARMRRRTQFSRRAVRNLIVLSVLAEVLAVVYAIMTTRNEDLTWQMRAIRVLPMFILPAVSSVIYSTVVNFTRMFEQKDQKTLEKLRAERKAKIDELKERTNYYLTQQLIQKYDLDPAAKAAAASVLASKLGEETGLKVHVGEEPKLDAAVARSNDVEIVPSDGLRNRKQPSARGSRTGSPTSHTPAQGTETNLPPAPASAGLETAPAPVVVEHHQGSGASDGGGWIAKIAALLVGEDPSQSYALICGSCHMHNGLARKEDYPHVTYYCPHCHALNTSKQSMGQYSGSNSGRSTPVVLADGLSTSSSVQETELSNLTTLQELPEEGKTDKQQVEAS

SEQ ID NO: 73054 - protein, 386 aa, Zea mays
  Clone ID: LIB4742-082-E11_FLI.pep
LEAGRDSPFALFTIPPQNTSCDPRSLRRASIMSAYCGKYADELIKNAAYIGTPGKGILAADESTGTIGKRLSSINVENVEENRRALRELLFCCPGALQYISGVILFEETLYQKTKDGKPFVDVLKEGGVLPGIKVDKGTIEVVGTDKETTTQGHDDLGKRCAKYYEAGARFAKWRAVLKIGPNEPSQLAIDLNAQGLARYAIICQENGLVPIVEPEILVDGPHDIDRCAYVTETVLAACYKALNEHHVLLEGTLLKPNMVTPGSDSKKVTPEVIAQYTVRTLQRTVPAAVPAVVFLSGGQSEEEATLNLNAMNKLSTKKPWALSFSFGRALQASTLKAWAGKVENVEKARAAFLARCKANSEATLGTYKGDAAADTESLHVKDYKY

SEQ ID NO: 73055 - protein, 220 aa, Zea mays
  Clone ID: LIB4742-082-E6_FLI.pep
LETKLHAVRTQPAVRASVAVRDADRPQLDGDTEAAGHVQGGVRRLRPQRGGADGGGGRGGDQRRQGAEDRRVQGPVHRGERQVHPEGGQGVRLLQRLHVGPREPPAGGGQVPPPQVHPVPDAQVGGGEQGPRPPGLPPRRPRHRLLFHAGRRHGHRPPRRLLPLPRLRPPRRALLGHHQRRRVGVASRALNICACMPLQLFHTFFLVLLFFFLFGDRNCV

SEQ ID NO: 73056 - protein, 318 aa, Zea mays
  Clone ID: LIB4742-083-C7_FLI.pep
LDGGHGQQQRDRDHPEEQLPAVRARHGRRGPAHGAVLQRAPAAGLHLRGARPAAAGPGLPRPRLRHPGLRPRRLFASAGTGLDNKTAGVLSVIPLWKEVEYFKEYKRRLRRHVGVAGARRIVSDALYVVSVGTNDFLENYFLLVTGRFAEFTVGEFEDFLVAQAEWFLGEIHRLGARRVAFAGLSPIGCLPLERTLNTLRGGCVEEYNQVARDYNAKVLDMLRRLTAARPGLRVAYIDVYQNMLDLITDPSTLGLENVEEGCCATGKVEMSYLCNEKSPDTCDDADRYFFWDSFHPTQKVNQFFAKKTLDLCYDQLLL

SEQ ID NO: 73057 - protein, 286 aa, Zea mays
  Clone ID: LIB4742-034-B11_FLI.pep
ESQRGGQMATPSSSLCSSFASLRTASIGHPRGIASSTPRKAFQVRASARVDKFSKSDIIVSPSILSANFAKLGDQVKAVEVAGCDWIHVDVMDGRFVPNITIGPFVVDALRPVTDLPLDVHLMIVEPEQRVPDFIKAGADIVSVHCEQTSTIHLHRTVNQIKSLGAKAGVVLNPATPLTAIDYILDVVDLVLIMSVNPGFGGQSFIESQVRKIAELRRLCAEKGVNPGLRLMVVLVRKMPTRLLKLGRMPSLLALQFSGLQTTLKLSKESRPAKGLQLYTHKELDV

SEQ ID NO: 73058 - protein, 297 aa, Zea mays
  Clone ID: LIB4742-036-D7_FLI.pep
SRPAGNHRSLSFRCCTAHRSTTISGSNMGLALSRLEEIRTQYRMAAEDGEADSPAPAPVSPTGAAAASGGGTEKKKQADDSSSSSKTTEWVPHKFSEIVGQRRPGEDMFRGIYLPRSDQQPKTKKYWVDGRNANCFMLFPKGFSITWGSDERYWSWRKLTQEEKRGIDDEEANMEVAYLKDVCWLEIRAKLEMSHLTPGFTYVVAFVAKLEPNGYGWSEPVDLQIKCPGDIDGKPRQQRKESLWKTVDGKKWTDLNVGEVKAEAGQKGEMEIAMLRLGGDWKRGLSLRYIKIAPQKP

SEQ ID NO: 73059 - protein, 350 aa, Zea mays
  Clone ID: LIB4742-036-G10_FLI.pep
AGRVAPPHTSAPGLCRRRHRSLARLPAWARSTDSDSARPASCTGRRGSGLRECDGGNAGAASASASAGGGRGDDALPRRRPHSRRVRRRRRRLAERARHVLRRQRRFGHHGRRLRVRQPVQPGVRREQRGAEHGAVRRGAPLRRVLRDQVRGAARVAVVPAREALHPGHGHQLLPAKLRAPLRRRRLVQPAPPALRPRHAHVPPHRRVPRRHRARLLPPGAVPQVRRGAVHHQRLPVLQPGADHERGRRGGRGARERQGGQHRVAAHVQELGPELAVQRHPRRPGALLPRHRQRPPHLHLLERRPEHLAVRPDLRGQELQGLMHGMGCDGMGLGRRSQNSFLSFFLSSYT

SEQ ID NO: 73060 - protein, 368 aa, Zea mays
  Clone ID: LIB4742-042-A11_FLI.pep
RGRPGPPAPRHPSIDRSSSSNKKKKEKEEMGRSPCCCHDAGVKKGPWTEEEDRALVDHIQRHGGHVSSWRNLPKAAGLNRCGKSCRLRWTNYLRPDIKRGNFTDDEERLIIGLHAQLGNRWSTIATHLDGRTDNEIKNYWNTHIRKKLLRMGVDPVTHQRLPPDDLLLAVSASPTTTILSAAASQLRGLNTALMQVQALQFLLQAVSGVGNDVNAAAAAANGGGGLVPSLSAAADNNAVLNASRSVVPGFQDLQLTTMTRPLLVSHANHGSADHHPSYIATDDVVQRRLNASAPPVVGGGACAEPLAAALASTAYRHQVAAAADEPVNGFAELILSEPIEMPSMCSLEDEDHFWKDMLVESSSFSLPL

SEQ ID NO: 73061 - protein, 332 aa, Zea mays
  Clone ID: LIB4742-042-G6_FLI.pep
SRETVAQEAFHYSDGLTHCLCGGGMVPEEAEEQVVDLLWELLLHEVAPLRDVGDLEVRHEVVHDPAAHGGLEPRELERVVLLPHHHEHRHLELGVQPVRELVHRSVRHLERVPEAGLLVELGVGVQVLLGEPLREGRGQVGQVHDLLPFLGNRDLGAGEEHVDGAHHAPHVEPAEVGLRPARLAPAQDVESFGHDGVEGHGVLQRELVRRHGAEVLAHQERLRDAEGVEDAEHVGDEVVKGHLLVLRRLLRQAVPAAVRRDGAVPRRGHGPHLVAPRVPYLREAVQEHHRAQFTCAYLCDVEVEAADGDVGVLDLLRHCCSLFKDGRRVPAG

SEQ ID NO: 73062 - protein, 311 aa, Zea mays
  Clone ID: LIB4742-044-H1_FLI.pep
RNATPTPQARGNREYLTLCNRRHAQVLTVDLMDQIMDFPVDPIMAAKAYKYKAEILINEYLLADSYVLYTSVLAGLLMCKLSYDFTHIISSVYFKGYASLAKMKKIEWNNRGMSTVHAIFITMMSVYLVFLSDLFSDQLEGPVTFRSSHLSNLTLGVSVGYFIADLAMIFWFYPSLGGMEYVFHHILCLVCAVYSMLSGEGQLYAYMFLISETTTPGINLRWFLDVAGKKNSKAYIANGVAMFVTWLMVRIVLFVYLFYHILTNYDQVKQMDTFACVLISVAPTILFTMNIIWFSKIVKGLKKTLAKRHTE

SEQ ID NO: 73063 - protein, 374 aa, Zea mays
  Clone ID: LIB4742-058-G6_FLI.pep
LFLRQAPAARSPAMASASHAPTPLLKDELDIVIPTIRNLDFLEMWRPFFQPYHLIIVQDGDPSKTIRVPEGFDYELYNRNDINRMLGPKASCISFKDSACRCFGYMVSKKKYIYTIDDDCFVAKDPSGKDINALEQHIKNLLSPSTPFFFNTLYDPYRVGADFVRGYPFSLREGVPTAVSHGLWLNIPDYDAPTQLVKPLERNTRYVDAILTIPKGTLFPMCGMNLAFDRELIGPAMYFGLMGDGQPIGRYDDMWAGWCTKVITDHLGLGVKTGLPYIWHSKASNPFVNLKKEYNGIFWQEELIPFFQSVSLPKEATTVQKCYLELAKQVRAKLGKVDGYFNKLADSMVTWIEAWDELNPPKGGVPTANGPPKK

SEQ ID NO: 73064 - protein, 264 aa, Zea mays
  Clone ID: LIB4742-059-B10_FLI.pep
RGRPGPSANRRALSLSICDVSLPPPPPYATQKTSQDAPLLKTHSMASATGVSSSEMAVDHATGPGAVDKPRFDALTPNEMSGGRPQFRKVPVPQHRFAPLKRCWMEIYTPVYEHMKIDIRMNLKARRVELKTRQDTPDVSNLQKCADFVHAFMLGFDIADAVALLRLDDLYVDSFEIKDVKTLRGEHLSRAIGRLSGKGGKTKYAIENSTRTRIVIADTKIHILGSFVNIKVARDSLCSLILGSPAGKVYSKLRAVSARLAERY

SEQ ID NO: 73065 - protein, 391 aa, Zea mays
  Clone ID: LIB4742-059-C2_FLI.pep
SRPAGPLRLVRHFPAMAATAADEFVKGRVFPNGVAVITLDRPKALNAMNLEMDVRYKALLDEWETNPSVKCILVESSSSRAFSAGGDVKRLANDCTMPEIIEVFTVEYSLICKIHEYAKPYICLMDGVTMGFGIGLSGHGRYRIITERTLLAMPENGIGLFPDVGFAYIGAKAPGGGAVGVYLGITGKRISSPADAMFIGLGTHYVPSANLGSLKESLLSANFTNDPHRDVESVLTGYKKEPESEPQLKKLLPYIISSFSPDKSVAESVEELKKCSRSGDAAVAEWANEALAGIEKGAPFSLCLTQKHFSQVASAYGTSEHYLSKLAGVMKLEYRIALRSSIRNDFVEGVRAVLVDKDQNPKWNPATLEEVNMAEVESVFEPLGAEAELSV

SEQ ID NO: 73066 - protein, 213 aa, Zea mays
  Clone ID: LIB4742-059-D4_FLI.pep
LARIEEELCPAMQRGDPLVVGRIIGDVVDPFVRRVPLRVAYAAREVSNGCELRPSAIADQPRVEVGGPDMRTFYTLVMVDPDAPSPSDPNLREYLHCMLQHTYCQDLVYILHLVRLVTDIPATTGVSFGTEVVCYESPRPVLGIHRVVFCSSSSSAGRRCTPRGGGRTSAPATSPGSTTSACRSPPSTSTARGSPEPVGEECDLDPAGWKLIR

SEQ ID NO: 73067 - protein, 199 aa, Zea mays
  Clone ID: LIB4742-051-B8_FLI.pep
SKALLGWCLPPAIDKTVTELPGVLSFLVHPACQIKVNSCHYFSCKKESLLFIFRATAASSSDSGILQVCNEISTFLWLFQSREYHLGSRNVLLGIKQVVIQSALLPNHSHVLVSRRVRVTRCCTRLPPKQTIQIRTLLVAGALVDGVALRALGLEDLLASSWVPRGRFRKRRHRYQARSREGRRGRWARARIALTGRPR

SEQ ID NO: 73068 - protein, 229 aa, Zea mays
  Clone ID: LIB4742-052-F9_FLI.pep
LETRRTMELPPLEVEIQKSRKKTRGRWVGLHDGAGVGVLVAEGGGVADLGGGGPGERRGGGVGDDVADVAGGGLLVVGARRVGVLHHLVGHVGPGLHPLARLVGDAAHDLGGVHVARDRHLVLLGRHLHGAHALHALHRLLHLALAPFAVDAHLHLHRLELLPLLEMPASPRQGAELGDDVDDAHRSQQAFSSLPFPSLHLDPTPSYRNGETRKDLLSALVQQSELRLF

SEQ ID NO: 73069 - protein, 176 aa, Zea mays
  Clone ID: LIB4742-055-F9_FLI.pep
RGRPGNAKQCLFSSSRPEETPTGGGRICAAMATSNTARMEDGGGDLRSTIKKWNIIYPVYLNSKKTVAEGRRIAAAKACPDPTCIEIADCCSHLKIPHAIELDKAYPRDFFQVGRVRVQLKKDDGSPVNPAIKTKKQLMIQVAELVPKHHGRTKKQEPAPNPGGSSKNTKGGKKKK

SEQ ID NO: 73070 - protein, 146 aa, Zea mays
  Clone ID: LIB4742-036-C3_FLI.pep
LSTSSQARQRELRKRHRQPLQTREEMRSTTEPVQSAALALEGVHNIHGGDGLAASVLGVGDRVADDILEEDLEHAAGFLVDKPGDTLHAAPPRQPPDCRLRDTLDVVAENLTVAFRAALAQPLAALAAPRHRRRVGRRQWCATRRL

SEQ ID NO: 73071 - protein, 295 aa, Zea mays
  Clone ID: LIB4742-036-G2_FLI.pep
AKMLRRNIRQRREYLYSKSLEGPQRALFEKKRRIRAALEEGKPIPTELRNEEHDLRRQIDLEDQERQVPKSIVDNEYATATIREPKILLTTSRNPSAPLTQFVKELKVVFPNSQRMNRGGQVISEIVEACRSHDITDLILVHEHRGQPDGLIVSHLPHGPTAYFGLLNVVTRHDIKDRKTMGKMSEAYPHLILDNFSTQIGERTATILKHLFPVPKPDSKRIITFANRDDYISFRHHVYEKPGGPKSIDLKEVGPRFELRLYQIKLGTVEQKEAQSEFVLRPYINTAKKQKTLGA

SEQ ID NO: 73072 - protein, 210 aa, Zea mays
  Clone ID: LIB4742-047-D11_FLI.pep
AGRDPGTAAMSSAAASSSPAAGSEGSGGAVEGREIAYVSYGGEHHLPLVMSLVDEELSEPYSIFTYRYFVYLWPQLTFLAFDARDGKCVGTVVCKMGEHRGAFRGYIAMLVVLKPYRGRGIATELVTRSIRVMMESGCEEVTLEAEVTNKGALALYGRLGFIRAKRLYRYYLNGVDAFRLKLLFPRPDPGLPPMMVGNDRDDQKMDSPYL

SEQ ID NO: 73073 - protein, 188 aa, Zea mays
  Clone ID: LIB4742-063-E6_FLI.pep
PKKKGQLNYIESMETKIHYIVKQKNHESKFCHFASINHLPNHAQRYGRRRPHHRAAAGNSSSLPVHVSLPTDPQVEAAVLELAVLLAQSQVLAAAVHQDVRALPFVQVVLGPQLGPVEARVQAPHPRRRADEPVHQSARDTWAGALVHDVSDLPERDAGAQACDETVPRVVHAVEEAGGPFPQPAAGA

SEQ ID NO: 73074 - protein, 152 aa, Zea mays
  Clone ID: LIB4742-032-D8_FLI.pep
TDVQLWLCVDESKRRVACPVRARAIYIRGNFMLRFRWYGVGTALFGGNFCCHAACANCLTNLTSPQNTNTIHLISPLFCTSHLVLSTLNLRLGKWGLYGEEYSFCNLDFSHPGLAASVLFRLLLPRFFAEVLLNLCDYFFVLTFFLLSVPLF

SEQ ID NO: 73075 - protein, 435 aa, Zea mays
  Clone ID: LIB4742-065-G4_FLI.pep
PAGTRSTSRRIPSHYHPSRRPPIRSGSSNPGAVMATKRSVGTLGEADLKGKKVFVRADLNVPLDDAQKVTDDTRIRASVPTIKFLLEKGAKVILASHLGRPKGVTPKYSLKPLVPRLSELLGVEVVMANDCIGEEVEKLAAALPEGGVLLLENVRFYKEEEKNEPEFAKKLASVADLYVNDAFDTAHRAHASTEGVTKYLKPAVAGFLMQKELDYLVGAVANPKKPFAAIVGGSKVSSKIGVIESLLAKVDILILGGGMIYTFYKAQGYSVGKSLVEEDKLELATSLIEKAKAKGVSLLLPTDIVVADKFAADAESKIVPATAIPDDWMGLDVGPDATKTFNEALDTTKTVIWNGPMGVFEFEKFAAGTEAIAKKLAELTTTKGVTTIIGGGDSVAAVEKAGLADKMSHISTGGGASLELLEGKTLPGVLALDDA

SEQ ID NO: 73076 - protein, 289 aa, Zea mays; identical to SEQ ID NO: 66657
  Clone ID: LIB4742-072-G11_FLI.pep

SEQ ID NO: 73077 - protein, 369 aa, Zea mays
  Clone ID: LIB4742-033-E4_FLI.pep
RGRPGAAHSLSLYLPVVTRSPVPLAFRHLLLPHRLRLRLASAVSPSRARPLGLGARPPRPHAAPLGYGVGAGRRPSGGLDHRAMSSSTNSTVATELSVSENSREIEPLPFVNDKHGGVIIEMKTPMDPGVFSAYLKAALAKWREQGIRGVWIKLPITLSNLIPTVVEEGFWYHHAEETYLMLAYWLPNTTHTLPVNATHRVGVGAFIMNDKREVLVVQEKSGVLRGLGVWKFPTGVVEPGEDINVGAIREVKEETGIDAEFVEVLAFRQSHKAFFDKSDLFFVCLLRPLSYDITKQDSEIEACQWMPVEEFAAQPFVQKHELVKYILEVGLAKVDKKYAGFSPISIKSAFTDKLSLFYMNRRDLDKASG

SEQ ID NO: 73078 - protein, 194 aa, Zea mays
  Clone ID: LIB4759-039-G11_FLI.pep
PMRMIPDNALAINRDIYMAGHFLLTNLLLENMKKTCRDSGIEGRIVNLTSSAHSITYREGICFDKIHDPSSLNDFVAYGQSKLANILHSNELSRILKEDGVNISANAVHPGVIMTNLFRNRTIVSALLNSIGRIICRTVEQGAATTCYVAMHPQVRGISGKYFTNCDVANPSSQASDAELAKKLWQFSLQIVSS

SEQ ID NO: 73079 - protein, 420 aa, Zea mays
  Clone ID: LIB4759-046-E1_FLI.pep
NLSPRRASKSSEPPARPPPSPPPVPKANSFQVAMADQANQPTVLHKLGGQFHLRSIISEGVRARNICPSVSSYERRFATRNYMTQSLLGPSMSVSGGINVPVMRTPLCANAPAEKGGKNFMIDFMMGGVSAAVSKTAAAPIERVKLLIQNQDEMIKSGRLSEPYKGIVDCFKRTIKDEGFSSLWRGNTANVIRYFPTQALNFAFKDYFKRLFNFKKDRDGYWKWFAGNLASGGAAGASSLFFVYSLDYARTRLANDAKAAKGGGERQFNGLVDVYRKTLKSDGIAGLYRGFNISCVGIIVYRGLYFGLYDSIKPVVLTGNLQDNFFASFALGWLITNGAGLASYPIDTVRRRMMMTSGEAVKYKSSLDAFQQILKKEGPKSLFKGAGANILRAIAGAGVLSGYDQLQILFFGKKYGSGGA

SEQ ID NO: 73080 - protein, 296 aa, Zea mays
  Clone ID: LIB4762-027-E7_FLI.pep
AAGPALRLRIPSLRADCPAPSPATPAPHPHSPHRRLRSRRRVPSPRVVRLPGREPGRYTNMRLNKVEVNLIRLLEAAPRQQNQAKLLYYVTTARELLEQLGAETTPEGISSISKAKLSEYSEKIEALASRLAASLPENEKPITESRDEISYDEAKAESPISLSSGLRRRSTAHAEVGPSHHERKEDIGAPIKLDGEAQAHIEKHRKLQEDLTDEMVELARQLKESSLMMNQSVQETEKILDSTERAVEHSLASAGHATSRAAEVYSLASKTTCFQWLLMFVMACMFVMVVLLIRIT

SEQ ID NO: 73081 - protein, 334 aa, Zea mays; identical to SEQ ID NO: 47994
  Clone ID: LIB4764-003-A1_FLI.pep

SEQ ID NO: 73082 - protein, 363 aa, Zea mays; identical to SEQ ID NO: 42242
  Clone ID: LIB4764-017-G7_FLI.pep

SEQ ID NO: 73083 - protein, 413 aa, Zea mays
  Clone ID: LIB4765-003-H4_FLI.pep
SESSEPPARPPPSPPPVPKANSFQVAMADQANQPTVLHKLGGQFHLRSIISEGVRARNICPSVSSYERRFATRNYMTQSLWGPSMSVSGGINVPVMQTPLCANAPAEKGGKNFMIDFMMGGVSAAVSKTAAAPIERVKLLIQNQDEMIKSGRLSEPYKGIVDCFKRTIKDEGFSSLWRGNTANVIRYFPTQALNFAFKDYFKRLFNFKNDRDGYWKWFAGNLASGGAAGASSLFFVYSLDYARTRLANDAKAAKGGGERQFNGLVDVYRKTLKSDGIAGLYRGFNISCVGIIVYRGLYFGLYDSIKPVVLTGNLQDNFFASFALGWLITNGAGLASYPIDTVRRRMMMTSGEAVKYKSSLDAFQQILKKEGPKSLFKGAGANILRAIAGAGVLSGYDQLQILFFGKKYGSGGA

SEQ ID NO: 73084 - protein, 279 aa, Zea mays
  Clone ID: LIB4767-014-A7_FLI.pep
TASITRDPASTRRPPGTAAGTPRIESPPVPILLTPRHRWRANRRHGRRAPGPRRRCQRRRPSPPPRPCRRRQRKHGGARGGPRFLCRRDLVRLHLPGRPPGDSIHEAVQAGGAAVRGFEHLAFLNFAQNVVCFVWSFLMIKLWSSGSGSSSDGRAPLSKYWGVSVTNTIGPTMGIEALKYINYPAQVLAKSSKMIPVDCELDEPNTFEDDPQDTFEQVMLMGTLLYGVKYTLPEYFCTFLVAGGVSSFALLKTSSKRPRQLRSLPTLMHLLAIHCASST

SEQ ID NO: 73085 - protein, 353 aa, Zea mays
  Clone ID: LIB4767-014-H5_FLI.pep
NSTLHSSHAKRGPHLDPRRRADLTIASLQPTATPSSPPAIYPARAPLLLLLLLILLPRRSGGRDLRSGWVAMAAAGRNAGVLALFDVDGTLTAPRKGVTPEMLEFMKQLRQVRIETTLPLGPGVFFFRSMTRNYIFIFFWELHPFFNKIWEQHVTVGVVGGSDLVKITEQLGSTVITDYDYVFSENGLVAHKNGQLIGTQSLKSFIGEDKLKEFINFTLHYIADLDIPIKRGTFIEFRSGMINVSPIGRNCSQEERDEFEKYDKVHNIRPKMVSVLREKFAHMNLTFSIGGQISFDVFPQGWDKTYCLRYLEEFQEIHFFGDKAYKGGNDYEIFESERTVGHQVCYCWLYGKG

SEQ ID NO: 73086 - protein, 268 aa, Zea mays
  Clone ID: LIB4829-006-A6_FLI.pep
SRVPEPRFPKHAQHTNTHRAQLRGDLPAAGEMSRGTGAGYDRHITIFSPEGRLYQVEYAFKAVKSAGVTSIGVRGADSVCVVTQKKVPDKLLDQTSVTHLFPITKYVGLLATGLTADARSLVSQARNEAAEFRFKWGYEMPVDVLAKWIADKAQVYTQHAYMRPLGVEKNAQLFKCDPAGHFFGHKATSAGLKEQEAINFLEKKMKDDPKFTYDETVQIAISALQSVLQEDFKATEIEVGVVRKDDRVFRALTTEEIDQHLTAISERD

SEQ ID NO: 73087 - protein, 474 aa, Zea mays
  Clone ID: LIB4862-012-E9_FLI.pep
WFGSVLGGGIVTEAALKAHAAAVRVVSRRGAVRLVLVSAIAWAMLGLVALAFHLRPCSSPVAFLSALCEKDSKVFSVLDSMGLSSKPLHRCPIPVANDPNAIAIPKRTPNTIVKKLSYITVDKQDKDPSPLFGGHQNWKQREESFKLNSTMKVHCGFMKNSGADMDTIDLKYIQKCRFVVASGIFDGYDIPHQPSNISHRSQKLFCFLMVVDEVSLDFVQKNASVKIDSAGGKWVGIWRLIRVHRLPFDEPRRNGKIPKILTHRLFPEAWYSIWIDGKMELIVDPLLILERYLWRGKNTFAVAAHKHHRSIYEEGDAIKRRKRYARPLVDLQMKLYYYEGMEPWSPKKKMPSDVPEGAVLIREHTTMTDLFSCLWFNEVNLFTPRDQISFGYVVHRLGGALKFFMFPNCEYNSLFILHGHTREHSSKVEWAKTTDEIVKKGLKESRGGLGLWTPYPADLSSVEVPAVKRTSPAG

SEQ ID NO: 73088 - protein, 327 aa, Zea mays
  Clone ID: LIB4867-005-B12_FLI.pep
ECMHETLILLMIDHDTQQLSTHASCFFIQKIPRSGDDDDVLLLLHACSPLRTTAVAAARRGLLLLLGGRAGDEVLVDDAGEAGADHGPHPVHPLVSPATGAHDGGPERARRIHHGALQRAAGQHVGPRQEPHGERRRQRSGAGADPPRFVHHRRKVGVHEPERHGRLQHRRVPSAHAPGQRVLRQMHPSGGEPEHERGGDGAEQLRGPVDEGADEADPAGDQRAEGDGRVDVAAGDVGGAPHGGREREGVRERHRHQAAAALVMVVHPPERERGALGGEDEDGGGEEFGGRVAQRGGVFGRSQVADGEPAPYCPDHIHGCQLMDRSI

SEQ ID NO: 73089 - protein, 54 aa, Zea mays
  Clone ID: LIB84-017-G4_FLI.pep
PVLRLTKNFNVSNIGQRVQLESPKTQVFKAKQSIAIEDATGIWTFRPQKNTELQ

SEQ ID NO: 73090 - protein, 152 aa, Glycine max
  Clone ID: JC-GMXLIB3563P016BC05_FLI.pep
KETLKQYPEPMKLLSYSSLLGTILSAIVSGIVERDINAWKIKRNKDVILIVLTALVGGVIRPNIQVWFTRMKGPLYVPLFKPFGIAFATTFAVCFFSNSLHYGSVIGTTVLGMGHYTVMYGQLRENEEETSCDESSDSLDKMVPLLQEKMEV

SEQ ID NO: 73091 - protein, 128 aa, Glycine max; identical to SEQ ID NO: 54240
  Clone ID: JC-GMXLIB3563P026BE10_FLI.pep

SEQ ID NO: 73092 - protein, 408 aa, Glycine max; identical to SEQ ID NO: 52523
  Clone ID: JC-GMXLIB3563P040AB09_FLI.pep

SEQ ID NO: 73093 - protein, 259 aa, Glycine max
  Clone ID: JC-GMXLIB3563P082DE09_FLI.pep
RAGFMWGLNLYKRPKLSGAMLGAILPLAAVHTLGNLFTNMSLGKVAVSFTHTIKAMEPFFSVILSAMFLGEFPTPWVVGSLVPIVGGVALASVTEASFNWAGFWSAMASNVTNQSRNVLSKKAMVKKEDSMDNITLFSIITVMSFFLLAPVAIFMEGVKFTPAYLQSAGVNVRQLYIRSLLAALCFHAYQQVSYMILQRVSPVTHSVGNCVKRVVVIVSSVIFFQTPVSPVNAFGTAIALAGVFLYSRVKRIKAKPKTA

SEQ ID NO: 73094 - protein, 107 aa, Zea mays
  Clone ID: JC-ZMXLIB3526P033CC12_FLI.pep
VKYPTKTTRTVGGAGKVMPSENTVAEVLPDCHLIPQFMKDHAASVPPCFSNITDCQQYDVASDLHLHIPRPLETIEMIQQLPYIVVLRDYSVLTVCSQSEECISLCV

SEQ ID NO: 73095 - protein, 367 aa, Glycine max
  Clone ID: jC-gmst02400032f11_FLI.pep
ISSQIKTTSKTLGEDNCLGVKVEGSRLRYVDHQQRQQRALQLGMIQHNAWRPQRGLPERAVSVLRAWLFEHFLHPYPKDSDKVMLAKQTGLTRSQVSNWFINARVRLWKPMVEEMYLEEVKQEPNNSSQDNNNTKGSNESSKELWSEANAAAQESGAMRFDQINILQSKAESFKNNQTTSPTEISNSNSLQSGFHLADMQSPNKPKSTSEMHQNSPGSILSVDMEMKPHHHGETNNITREGQNNNTTTKFGIESHGGGFGAFPNMEDIGRFHHHVTEQLAPRFHGNGVSLTLGLPHSTENNLSLSGTTQHGFLSQNMHLGMRNSENDEFCGAINTTPPSSHSGISYESIDIQNRKRFAAQLLRDFVA

SEQ ID NO: 73096 - protein, 470 aa, Lycopersicon esculentum
  Clone ID: CC-ESFLCLEL16K02_FLI.pep
NSRGVKEMECSSRTSNFPSDLEYQTGFGNHFSSEAIVGALPQGQNSPLICPFGLYAEQISGTSFTSPRKLNQRSWLYRIKPSVTHEPFRPRMPRHEKLVSEFNQSNSSATPTQLRWKPVEIPETPTDFIDGLYTICGAGSSYLRHGFAIHMYTANKSMENSAFCNADGDFLIVPQKGRLWITTECGRLQVCPGEIVILPQGYRFAVDLPDGPSRGYVAETFGTHLQLPDLGPIGANGLAAPRDFLVPVAWYGDGSRPGYTIVQKYGGELFTAKQDFSPFNVVAWHGNYVPYKYDLSKFCPYNTVLMDHSDPSINTVLTAPTDKPGVALLDFVIFPPRWLVAEHTFRPPYYHRNCMSEFMGLIYGGYEAKADGFHPGGASLHSCMTPHGPDTKTFEATIALGNEAGPHRIADTMAFMFESCLVPRVCPWALESPFMDHDYYQCWIGLKSHFSGLSMNEDNVDLQKGKPIER

SEQ ID NO: 73097 - protein, 250 aa, Zea mays
  Clone ID: JC-ZMSHLIB3587P034F10_FLI.pep
CGSSRGPGGCSRSASFMDAFRYGRLLRSSSLIMSSFFSAPYARTSACSFFMTRLWFMSSAMADSSTRYEVSMAASNTFCFVKPAGHMERKLITLRASAYIYAWILAQNNNEEDDDGIDYHEEGLDVIHGEAVLLVSGEEDVDEVVRLLLLVAGQLPHLHVLVDHLLQQGVPALEVARDLPAHEPEEQVRQRPPRDVVLQVEPHQEVHVGHGHLPEQRVPAFLPVRRAQHRPAHHVVGVRRQHLAHVHGRR

SEQ ID NO: 73098 - protein, 412 aa, Glycine max
  Clone ID: JC-GMXLIB3563P012CF08_FLI.pep
ITLFRFTFLSCLRHHHSLFFYPKPLNRSKSLPNRKPLLLNSVNSLPKFRCRRLGFGAYDKKMGEGERFQLGTVGALTLSVVSSVSIVICNKALMSSLHFIFATTLTSWHLLVTFCSLHVALKMRFFEHKPFEQKAVIGFGILNGISIGLLNLSLGFNSVGFYQMTKLAIIPCTVLLETIFLGKRFSKRIQFALSILLLGVGIATVTDLQLNALGSFLSFLAVITTCVAQIMTNTIQKKYKVSSTQLLYQSCPYQAATLLISGPYLDKLLTNQNVFGFNYTTQVTVFIILSCLISISVNFSTFLVIGKTSPVTYQVLGHLKTCLVLAFGYILLRDPFSWRNILGILIAMIGMILYSYYCTLENQQKTVEAASQSSQAREDESDPLMNVENGSAVVSSNVGQRQMSPVWSKSKD

SEQ ID NO: 73099 - protein, 368 aa, Glycine max; identical to SEQ ID NO: 54208
  Clone ID: JC-GMXLIB3564P111AF11_FLI.pep

SEQ ID NO: 73100 - protein, 205 aa, Glycine max
  Clone ID: JC-GMXLIB3563P087AE09_FLI.pep
STFTTTPACSSPRKHNTHTTTIPLLPRWRQNTTPWRRRWRRYEPLPGDIPHGLPTPRPPRRRPPRRHVATPLRGLAHRQPCGAGGGDAALHFLQPGAGARRLRHRDGGDRGAGGGRVRAGGAGVVLVAGELSPADATGDDDEDDDDAAGAGKAARGGHGRVRGEEDEGCWARHSDKGTCTGNNRDGIVHSVIIRQENGFSLCLCL

SEQ ID NO: 73101 - protein, 177 aa, Zea mays
  Clone ID: jC-zmshLIB3587P024f01_FLI.pep
PAILLSHTHTHTDKWFPKPSVCTSNQLARAAAGSHHVGGEAPPLLQPPQEGRGAARRRVRVLRDRGGHRHRRGRVREVQEGGEGAQAQAAPRRGRRHRRRRLRTLREARGEEGPRARAQAQDHGGGRCRGGRRRRRLRIPRAPREEEGPQGRRGGQRREEAPPPLRLTVVPAGARPS

SEQ ID NO: 73102 - protein, 487 aa, Oryza sativa nipponbare
  Clone ID: jC-osleLIB3474046g02_FLI.pep
RPDVESSINSVRVAMALKVVSFPGDLAAVSFLDSNRGGAFNQLKVDLPFQTRDRRAVSLRRTCCSMQQAPPPAWPGRAVVEPGRRSWDGPKPISIVGSTGSIGTQTLDIVAENPDKFRVVALAAGSNVTLLADQVKTFKPKLVAVRNESLVDELKEALADCDWKPEIIPGEQGVIEVARHPDAVTVVTGIVGCAGLKPTVAAIEAGKDIALANKETLIAGGPFVLPLAQKHKVKILPADSEHSAIFQCIQGLPEGALRRIILTASGGAFRDWPVDKLKEVKVADALKHPNWNMGKKITVDSATLFNKGLEVIEAHYLFGAEYDDIEIVIHPQSIIHSMIETQDSSVLAQLGWPDMRIPILYTMSWPDRIYCSEVTWPRLDLCKLGSLTFKAPDNVKYPSMDLAYAAGRAGGTMTGVLSAANEKAVELFIDEKIGYLDIFKVVELTCDAHRNELVTRPSLEEIIHYDLWAREYAASLQPSTGLSPVPV

SEQ ID NO: 73103 - protein, 74 aa, Lycopersicon esculentum
  Clone ID: CC-ESFLCLEL15J17_FLI.pep
KEFGTRANEKAVELFISERISYLDIFKIVELTCAKHREELVSSPSLEEIIHYDLWARDYAASLEPSSGLSPALV

SEQ ID NO: 73104 - protein, 462 aa, Lycopersicon esculentum
  Clone ID: CC-ESFLCLEL39C24_FLI.pep
RIALKTFIGLRQSSPENNSIKISKSLPTNHTHRRLRINASKSSPRVTGRNLRVAVIGGGPAGGAAAETLAKGGIETFLIERKMDNCKPCGGAIPLCMVGEFDLPLDIIDRKVTKMKMISPSNVAVDIGQTLKPHEYIGMVRREVLDAYLRDRAAEAGASVLNGLFLRMDMPKAPNSPYVLHYTSYDSKTNGAGEKCTLEVDAVIGADGANSRVAKSINAGDYEYAIAFQERIRISDDKMKYYENLAEMYVGDDVSPDFYGWVFPKCDHVAVGTGTVTHKADIKKFQLATRLRADSKITGGKIIRVEAHPIPEHPRPRRLQDRVALVGDAAGYVTKCSGEGIYFAAKSGRMCAEAIVEGSENGKRMVDESDLRKYLEKWDKTYWPTYKVLDILQKVFYRSNPAREAFVEMCADEYVQKMTFDSYLYKKVAPGNPIEDLKLAVNTIGSLVRANALRREMDKLSV

SEQ ID NO: 73105 - protein, 363 aa, Lycopersicon esculentum
  Clone ID: CC-ESFLCLEL10D05_FLI.pep
APESRFTGESSSPLLLKESIKEREERRSIMVFSMVMSFSPSLCLPRSRMVMQKAIQCSSSVSTASESVKFDLKTYWTTLISDINQKLDEAVPVKYPNQIYEAMRYSVLAKGAKRSPPIMCVAACELFGGNRLAAFPTACALEMVHAASLIHDDLPCMDDDTTRRGLPANHTVFGVDMAILAGDALFPLGFQHIVSHTPSDLVPEDRVLRVITEIARAVGSTGMAAGQFLDLEGGPNAVDFVQEKKYGEMGECSAVCGALLAGASDEEIQHMRKYGRAVGVLYRVVDDILEAKKTENKTEGKKKKGKSYVSVYGIEKAVKVAEDLRAQAKRELDGLEKYGDKVMPLYSFLDYAADRGFSIDGQV

SEQ ID NO: 73106 - protein, 437 aa, Lycopersicon esculentum
  Clone ID: CC-ESFLCLEL23O18_FLI.pep
KEFGTSTDTTGATFKLVGFNNFIRANPRSDFFSVKRFHHIEFWCGDATNTSRRFSWSLGMPITAKSDLSTGNSVHASYLLRSVSGELQFVFTAPYSPSISVPSTAGIPSFSTPTYRDFTAKHGLGVRAVALEVENAYLAFSASVARGAKPRFEPVTIDEHVAVAEVHLYGDVVLRFVSLVKDADTLIFLPGFEAMDETSSFKELDYGIHRLDHAVGNVPELGPVVDYIKAFTGFHEFAEFTAEDVGTAESGLNSVVLANNDETVLLPLNEPVYGTKRKSQIQTYLEHNEGAGVQHLALVTEDIFRTLREMWKRSGVGGFEFMPAPPPTYYKNLRSRAGDVLSDEQIQACEELGILVDRDDQGTLLQIFTKPVGDRPTIFIEIIQRIGCMLKDEKGQVYQKGGCGGFGKGNFSELFRSIEEYEKMLEAKHVNQVAAVE

SEQ ID NO: 73107 - protein, 226 aa, Oryza sativa nipponbare
  Clone ID: JC-OSROLIB3475021F07_FLI.pep
VTAGVALALLRFFEELAKRGVFEQKLNRKLVHITIGMVFLLFWPLFSSGSYAPFLAAVAPGINIIRMLLLGLGVMKNEAMVKSMSRSGDPRELLKGPLYYATTITFATSIFWRTSPIAIALICNLCAGDGIADIVGRRLGQEKLPYNPNKSYAGSIAMALAGFMASIGYMHYFQSFGFIEESWSLAFGFLVVSVTAALVESHPISTHLDDNLTVPLTSFLVGSLVF

SEQ ID NO: 73108 - protein, 477 aa, Glycine max
  Clone ID: JC-GMXLIB3563P041DF04_FLI.pep
GVKYLPFENSIVLLPTPIHSLTNTKQTSPCWWRTLRGPLPSSSPQYKTQNSHNPTHHARQKRALVFRFRLFLFSFSFRSRKMQSAAFTFSPSLPLRNPSPNYWRRPSLSLRLSAKHGNSNSDDVNSNGVSSTFFTRRSWTLPPSSSFKFRPLPPRAAESAVPESAPVENPLFKTLELGALFGLWYLFNIYFNIYNKQVLKAFHYPVTVTVVQFAVGTVLVAFMWGLNLYKRPKLSGAMLGAILPLAAVHTLGNLFTNMSLGKVAVSFTHTIKAMEPFFSVVLSAMFLGEFPTPWVVGSLVPIVGGVALASVTEASFNWAGFWSAMASNVTNQSRNVLSKKAMVNKEDSMDNITLFSIITVMSFFLLAPVAIFMEGVKFTPAYLQSAGVNVRQLYIRSLLAALCFHAYQQVSYMILQRVSPVTHSVGNCVKRVVVIVSSVIFFQTPVSPVNAFGTAIALAGVFLYSRVKRIKAKPKTA

SEQ ID NO: 73109 - protein, 243 aa, Glycine max
  Clone ID: JC-GMXLIB3563P052CH08_FLI.pep
NHRNGHVVHPHATSGLMTIFGALASVASNVSYAMWLIIQAKMSERYPCPYSSTALMSLMGAVLSISFAFCVERDLSQWRLGWNIRLLTVAYAGIVVSGVMVAVISWCVRTRGPLFVSIFSPLMLVVVAFAGSTILDEKLYLGSIIGSMLIICGLYVVLWGKSKEMKKNQSGQSESTHKSDTIEIMVKPRVEDKSNNKSNTLINSVNVTGDNKDSWKNGRESNVSHIHCCKVQEEVTSQNVSRT

SEQ ID NO: 73110 - protein, 396 aa, Glycine max noir
  Clone ID: UC-GMFLLIB3275P112E12_FLI.pep
IDLNLSQIANPFCSIESILSLSSSVGVWVGKSCCFVFWVLEQRQKMGEGERFQLGTVGALTLSVVSSVSIVICNKALMSSLHFIFATTLTSWHLLVTFCSLHVALKMRFFEHKPFEQKAVMGFGILNGISIGLLNLSLGFNSVGFYQMTKLAIIPCTVLLETIFLGKRFSKRIQFALSILLLGVGIATVTDLQLNALGSFLSFLAVITTCVAQIMTNTIQKKYKVSSTQLLYQSCPYQAATLLIAGPYLDKLLTNQNVFGFKYTTQVTVFIILSCLISISVNFSTFLVIGKTSPVTYQVLGHLKTCLVLAFGYILLRDPFSWRNILGILIAMIGMILYSYYCTLENQQKTVEAASQSSQAREDESDPLMNVENGSAVVSSNVGQRQMSPVWSKSKD

SEQ ID NO: 73111 - protein, 420 aa, Glycine max noir
  Clone ID: UC-GMFLLIB3275P157G09_FLI.pep
PLDPSQKKKIKMATEKLRGCAKFFASSKPYLAMISLQFGYAGMNIITKVSLNQGMSHYVLVVYRHAFATAVIAPFAFIFERKGQPKITFPVFMQIFILALLGPVIDQNFYYAGLKLTSPTFSCAMSNMLPAMTFVMAVFCRMEKIDIKKVRCIAKIVGTLVTVAGAMLMTLYRGPIVEMVWAKHPHNKTNATTTTGSLDKDWFLGCTFLIIATLAWASLFVLQAKAIQTYKNHQLSLTSLVCFIGTLQAIAVTFVVEHNPSVWRIGWDVSLLAAAYAGIVTSSISYYVQGLVIKMKGPVFATAFSPLMMIIVAIMGSFILAEQIYLGGVIGAILIVIGLYSVLWGKHKEQIESKVADEIPLPVKDSQIAVIAGPIIDATDNFTEEKYGQKGEANNNKLSSLIITIPIPEPPTKANQERKA

SEQ ID NO: 73112 - protein, 109 aa, Glycine max
  Clone ID: UC-GMROMINSOY220C01_FLI.pep
GGPGTIKKLTLAEGLGYVKHHVDAIDTENYVYNYSVIEGSALSEPLEKICYEYKLVATPDGGSIVKSTSKYYTKGDEQLAEEYVKTGKERSAGFTKAIEDFIQANPDYN

SEQ ID NO: 73113 - protein, 326 aa, Arabidopsis thaliana columbia
  Clone ID: JC-ATXLIB327408P1D11_FLI.pep
AEVDLNKCEPWQLPGRAKMGEKEWYFFSLRDRKYPTGLRTNRATEAGYWKATGKDREIFSSKTCALVGMKKTLVFYKGRAPKGEKSNWVMHEYRLEGKFSYHFISRSSKDEWVISRVFQKTTLASTGAVSEGGGGGGATVSVSSGTGPSKKTKVPSTISRNYQEQPSSPSSVSLPPLLDPTTTLGYTDSSCSYDSRSTNTTVTASAITEHVSCFSTVPTTTTALGLDVNSFSRLPPPLGFDFDPFPRFVSRNVSTQSNFRSFQENFNQFPYFGSSSASTMTSAVNLPSFQGGGGVSGMNYWLPATAEENESKVGVLHAGLDCIWNY

SEQ ID NO: 73114 - protein, 248 aa, Arabidopsis thaliana columbia
  Clone ID: JC-ATXLIB327408P4H04_FLI.pep
SISQDVSAVIMTNASSAPPPPQAKRRLGRTSRSAMKPKIHRTKTRKTKKTSAPPEPNADVAGADKEALMVESSGAEAELGRPCDYYGDDCNKNLMSINGDNGVLTFDDDIIDLLLDESDPGHLYTNTTCGGDGELHNIRDSEGARGFSDTWNQGNLDCLLQSCPSVESFLNYDHQVNDASTDEFIDWDCVWQEGSDNNLWHEKENPDSMVSWLLDGDDEATIGNSNCENFGEPLDHDDESALVAWLLS

SEQ ID NO: 73115 - protein, 316 aa, Arabidopsis thaliana columbia
  Clone ID: JC-ATXLIB327412P3C10_FLI.pep
TYLSYSSRHYLFFTFCNWNLEMAMQTVREGLFSAPQTSWWTAFGSQPLAPESLAGDSDSFAGVKVGSVGETGQRVDKQSNSATHLAFSLGDVKSPRLVPKPHGATFSMQSPCLELGFSQPPIYTKYPYGEQQYYGVVSAYGSQSRVMLPLNMETEDSTIYVNSKQYHGIIRRRQSRAKAAAVLDQKKLSSRCRKPYMHHSRHLHALRRPRGSGGRFLNTKSQNLENSGTNAKKGDGSMQIQSQPKPQQSNSQNSEVVHPENGTMNLSNGLNVSGSEVTSMNYFLSSPVHSLGGMVMPSKWIAAAAAMDNGCCNFKT

SEQ ID NO: 73116 - protein, 347 aa, Arabidopsis thaliana columbia
  Clone ID: JC-ATXLIB327413P2H06_FLI.pep
LGFYMFRKKMLVLALFSIYFLSIEAVRNESFPALLAFGDSMVDTGNNNYLLTLMKGNYWPYGWNFDSKIPTGRFGNGRVFSDVVAEGLGIKRIVPAYRKLYIAPSDLKTGVSFASGGAGVDPVTSKLLRVLSPADQVKDFKGYKRKLKGVVGRSKAKKIVANSVILVSEGNNDIGITYAIHDAGMRLMTPKVYTSKLVGWNKKFIKDLYDHGARKFAVMGVIPLGCLPMSRLIFGGFFVWCNFLANTISEDYNKKLKSGIKSWRGASDFRGARFVYVDMYNSLMDVINNHRKYGFTHEKNGCCCMLTAIVPCSNPDKYVFYDFAHPSEKAYKTIAKKLVEDIKTGLA

SEQ ID NO: 73117 - protein, 129 aa, Arabidopsis thaliana columbia
  Clone ID: JC-ATXLIB327413P3A02_FLI.pep
AFASPSSGVMPDSTNPTMSVNAQGHEIQNGGGTTSQFSSALWALMDSIPSTPASACEGPLNRTFVRMSSFSRMRFNGKANGTPVSTTIAKKGIRNRGFLLLSIVGALCAIFWVLVATVRVSGRSLLLKD

SEQ ID NO: 73118 - protein, 159 aa, Arabidopsis thaliana columbia
  Clone ID: JC-ATXLIB327416P3G11_FLI.pep
PTHLSQQYCNNSFDNSFGDMSFMEEKPQMYNNQFGLTNSFDAGGNNGYQYFSSDQGSNSFDCSEFGWSDHGPKTPEISSMLVNNNEASFVEETNAAKKLKPNSDESDDLMAYLDNALWDTPLEVEAMLGADAGAVTQEEENPVELWSLDEINFMLEGDF

SEQ ID NO: 73119 - protein, 285 aa, Arabidopsis thaliana columbia
  Clone ID: JC-ATXLIB327426P3B12_FLI.pep
AYTTANVEILEAIAGETRVHIIDFQIAQGSQYMFLIQELAKRPGGPPLLRVTGVDDSQSTYARGGGLSLVGERLATLAQSCGVPFEFHDAIMSGCKVQREHLGLEPGFAVVVNFPYVLHHMPDESVSVENHRDRLLHLIKSLSPKLVTLVEQESNTNTSPFLSRFVETLDYYTAMFESIDAARPRDDKQRISAEQHCVARDIVNMIACEESERVERHEVLGKWRVRMMMAGFTGWPVSTSAAFAASEMLKAYDKNYKLGGYEGALYLFWKRRPMATCSVWKPNPN

SEQ ID NO: 73120 - protein, 359 aa, Zea mays
  Clone ID: JC-ZMXLIB3526P037CG02_FLI.pep
SVRAYVLNCTEARTYGRSGGGDERFVHFEVRDDPGNGACGGGDGDDEAGDAEQLQAHPPRAPPGHLLLHDVHLHGEVDGERPEPQRAQEPDHVVEEGQQHGHHRRGHHERRPPRQPEQAELVAPAGGGPERERDVDLARDVAGLGPPLARPLLDEGEQWLAVDLVGADEVHGDGGVGDVEEPEGLVEAEAREEVPGGVVPERGVPHAPAQHVEERGDGHADDGGAPHDLGLGRRRRADGVLDLDEDEGVGVGEGDVAERLQAAPHLVDRGDRADADPRQAALHALVGHHLRDAQAQADGGVGEGHDGGEDGEPRYLVEVRDLREENLHDAEDDHVGRAGDVAGVPVPLHVEAVRPLDRP

SEQ ID NO: 73121 - protein, 88 aa, Arabidopsis thaliana
  Clone ID: ARABL1-046-F3_FLI.pep
FRSHSRIFFTHISEKMASNMEVFCEILIAILLPPLGVCLKRGCCTVEFLICLVLTILGYIPGIIYALYVIVFQNREGSTELGAPLNSA

SEQ ID NO: 73122 - protein, 377 aa, Zea mays
  Clone ID: LIB3597-023-C6_FLI.pep
YGIVAGRRLHIAAVRNPSKQPSRPLPALLAALASCAHQSSPTKISKDGMALEAAYDYLHVAVVQCTPTQAAAVLGVLLLLAIRLAAAARSSSATSPKWKQHRLPPTPPGKLPIIGHLHLIGSHPHVSFRDLHAKYGHNGLMLVQVGAVPTIVVSTPQAAEAVLRTHDHVLASRPRNPVADIIRYNSTDVAFAPYGEYWRTARKVVNTHLLSAKMVFSKRREREEEVRLVVARIRDAAEASPGTALDMTELLGGYASDFVCRAVLGESHRKQGRNKLFRELTETSAALLGGFNVEDYFPKLADVDLFLRIICAKAKGVSKRWDSLFNELLSEYALSGGKQGDHNSEDFVHLLLSLQKDYGLTTDNIKGILVVIYATTY

SEQ ID NO: 73123 - protein, 125 aa, Zea mays
  Clone ID: LIB4720-022-C3_FLI.pep
TIHLTSPKKIPSTVEVIPMAKLLLGLLLALAILGTTSAAGCVQDAEDMKRECKQFELFPANPKLPPSAACCAVWKRADVPCLCKYANKEVEKVWCMEKVVYVANYCKRPFQPGYKCGSYTVPLSM

SEQ ID NO: 73124 - protein, 85 aa, Allium porrum
  Clone ID: LIB3804-017-A10_FLI.pep
FAPMNPMSIHSLQGRSHICYGVWNGKWCDFSMPFSIRALTPSENTVRPPMPVPSTFSDFSKDPYPTRAPTDLSLAIRGPRSAFFP

SEQ ID NO: 73125 - protein, 288 aa, Oryza sativa
  Clone ID: UC-OSFLCYP159C11_FLI.pep
QNQREALVAHNQLDTAARRTNARRGHGEVAMLREGAHEQGGVDEGGGPAADRLHQGARRGLLAVAAQGGGAPPLRQELPPPLDELPPPRPQARQLHRRRRRAHHQAPRPSRQQVVVDCGAAAGEDGQRDQELLEHAHQAQAPEPGHRPADAPAGQRREQRRRGERADHDGQHRRLSVPCAGAAAAAAQATQPGARRGAEQCELRQVRGVPAVGGRPQQQRRQLGRAAVPRPQPRPRPRPVHEPAELAAQDAGRRVVHDRVAPPSPPAAEDHLPLLPPRRPQRRRLQLQ

SEQ ID NO: 73126 - protein, 321 aa, Zea mays
  Clone ID: GC-ZMLELIB3340015A11_FLI.pep
LQSEFLNQSRNSLEEREAALRLREEIEEQELLLDFLQQLQKRKQDMADSLQDTVAFLSSDINEVLHQQSALGHCVNFSPDLDKEVCSGTVEDQSDCGSRKRFRPELQGVDMEENNRSVEECSRTVPSSELIQENVLSKSSRLMKNLKKLETAYFLTRSKLAKQVGNQINSCNRVVKRTTGSAVGTEASSIDDFSLERQYGRRQRGWVNSFLEGLCKYLSFSKLKVRAELKHCDSLNSSNLVCSVGFDRDREFFATAGVNKKIKVFEYNMIVNEHRDIHYPVVEMSNRSKLSCISWNSYMKSHIASSDFEGIVQVSSVACFL

SEQ ID NO: 73127 - protein, 83 aa, Zea mays
  Clone ID: GC-ZMLELIB3348047D12_FLI.pep
NSILSLAGKVFNLPNIFVSSFAVLRHGRCTVLQCQIFVNASCLQIFFQKVPRRLASAFGYCIQILVRDQKQSQFIHLSHLETK

SEQ ID NO: 73128 - protein, 267 aa, Zea mays
  Clone ID: GC-ZMLELIB3338051F08_FLI.pep
SPLLAPNLSSRQIAIQATFPWLFLSIYILLRTTDARPAHAFAANEICDRFATAGFNANMITYLTQQLHLPLVEASNLLTNFNGTAAFTPVLGAIIADSRAGRFWTIAGGGVLYQLGMLGLVVSALVPALRPASCGATGAAAAAAPPLTCQRANGGQLAMLYGSLLLTALGGGGIRPCVVAFGADQFGQRGKRPGGEQQWSYFNLYFFSMGLAVLLALTVVVYIQENVGWGWGFGIPAIAMFASVLSFVVGYPLYVKVKPQGSPSRGS
